(19) United States
(12) Patent Application Publication
(10) Pub. No.: US 2015/0361403 A1
(43) Pub. Date: Dec. 17, 2015

(54) IMPROVED BACULOVIRAL EXPRESSION SYSTEM AND METHODS OF PRODUCING THE SAME

(71) Applicant: EUROPEAN MOLECULAR BIOLOGY LABORATORY, Heidelberg (DE)

(72) Inventors: Imre Berger, St. Egreve (FR); Deepak Balaji Thimiri Govinda Raj, Saint Martin le Vinoux (FR)

(21) Appl. No.: 14/763,740

(22) PCT Filed: Feb. 10, 2014
(86) PCT No.: PCT/IB2014/058885

§ 371 Date: Jul. 27, 2015

Related U.S. Application Data
(60) Provisional application No. 61/762,607, filed on Feb. 8, 2013.

(51) Int. Cl. C12N 7/00

(52) U.S. Cl. CPC C12N 7/00; C12N 2710/14121; C12N 2710/14151

(57) ABSTRACT

The present invention is based on the discovery that large parts of the genome of nucleopolyhedtovirus (NPV)-alpha baculovirus clade Ia viruses can be deleted with out deleterious effect on the usability of the virus comprising such genome in the infection of cells in cell culture. Accordingly, the present invention provides NPY-alpha baculovirus clade Ia genome which is reduced in size in comparison to the respective native NPV-alpha baculovirus clade Ia genome, such genomes comprising heterologous nucleotides, viruses comprising either of these genomes, cells infected with such viruses and methods for producing such viruses and cells.

### TECHNICAL FIELD OF THE INVENTION

[0001] The present invention is based on the discovery that large parts of the genome of nucleopolyhedrovirus (NPV)-alpha baculovirus clade Ia viruses can be deleted without deleterious effect on the usability of the virus comprising such genome in the infection of cells in cell culture. Accordingly, the present invention provides NPV-alpha baculovirus clade Ia genomes which are reduced in size in comparison to the respective native NPV-alpha baculovirus clade Ia genomes, such genomes comprising heterologous nucleotides, viruses comprising either of these genomes, cells infected with such viruses and methods for producing such viruses and cells.

### BACKGROUND OF THE INVENTION

[0002] The understanding of the cellular machinery has increased tremendously in recent years mainly due to astounding progress in ‘omics’ research (genomics, proteomics and glycomics) (Nie Y, et al (2009) Curr. Genomics 10:558-72). Comprehensive genomics datasets are now available for many organisms including human, and focus has now shifted to elucidating the cellular proteome in correlation with the live cellular functionality and morphology. One essential lesson learned is that proteins in eukaryotic cells typically do not work in isolation but coexist in large and highly diverse assemblies of ten or more interlocking subunits. These stably or transiently associated multiprotein assemblies additionally work together with separate proteins or multiprotein assemblies to carry out essential cellular processes including signaling, energy generation, and transport of food, water or waste.

[0003] A considerable number of accessory proteins typically accompany any individual multiprotein complex at various stages of its production, trafficking, active life and degradation. For example, chaperones are often critical for proper assembly of complexes, while other proteins are required for proper targeting and activation through post-translational modification. The activity of complexes is often fine-tuned by the incorporation of isoforms of individual subunits, for example to mediate tissue-specific functions. To fully understand biology, it is clear that new methods are needed to unlock the assembly, structure and mechanism of all of the complexes that exist in our cells. This is not only essential for basic research, but equally important for enabling novel approaches in the pharmaceutical and biotech industries to drive development of new and better drugs that more specifically modulate cellular functions. An imposing bottleneck that obstructs progress in these areas stems from the typically low abundance and high heterogeneity of protein complexes in their native cells. Apart from a handful of notable examples, most human multiprotein complexes remain virtually inaccessible to date.

[0004] Recombinant overexpression can provide a solution to this problem. However, until recently, the production challenge for eukaryotic (especially human) multiprotein complexes has not been systematically addressed. The provision of human multiprotein complexes in the quality and quantity required for mechanistic studies and drug design poses particular challenges due to the complexity of the machinery at work in our cells. Technical factors for heterologous protein production including protein yield, stoichiometric ratio between subunits, post-translational modifications, folding, and stability are all of critical importance, and ideally a highly flexible heterologous expression system should be available that can provide these functions for a wide range of protein complexes. An attractive solution could be mammalian expression systems, which naturally provide the required functions to accurately reflect what takes place in our cells, and heterologous expression in mammalian systems has become increasingly popular, especially for secreted proteins such as therapeutic antibodies (Nettleship J E, et al. (2010) J Struct. Biol. 172:55-65). However, mammalian systems often do not provide acceptable yields for intracellular proteins, and multiprotein expression technologies for mammalian cells are still in their infancy, albeit progress has been made recently, opening interesting options to depict with hitherto unattainable precision entire pathways in mammalian cells, for example for pharmacological screening studies (Kriz A, et al. (2010) Nat. Commun. 2010; 1:120).

[0005] An attractive alternative to mammalian systems is heterologous expression using recombinant baculoviruses to infect insect cell cultures. This method was pioneered three decades ago (Summers M D (2006) Adv. Virus Res. 68:3-73) and has become a method of choice for producing high levels of many eukaryotic proteins including a large number of proteins of pharmaceutical interest (Kost T A, et al. (2005) Nat. Biotechnol. 23:567-75 and Jarvis D L (2009) Methods Enzymol. 463:191-222). A significant advance over existing baculovirus expression vector systems (BEVS) came with the introduction of MultiBac, an advanced BEVS particularly tailored for producing eukaryotic multiprotein complexes for structural and functional studies (Bieniossek C et al. (2012) Trends Biochem. Sci. 37:49-57; Bieniossek C, et al. (2009) Nat Methods 6:447-50; Bieniossek C, et al. (2008) Curr. Protoc. Protein Sci. Chapter 5: Unit 5.20 and Fitzgerald D J, et al. (2006) Nat. Methods 3:1021-32). MultiBac consists of a baculovirus genome that has been engineered for optimized protein production by deleting protease and apoptosis activities (Barger I, et al. (2004) Nat. Biotechnol. 22:1583-7). In a subsequent improvement of the system, a new suite of transfer vectors was introduced to facilitate introduction of many heterologous genes into one recombinant MultiBac baculovirus by a method called Tandem Recombineering (TR), involving sequence-and-ligation-independent cloning (SLIC) and Cre-LoxP recombination (Trowitzsch S, et al. (2010) J. Struct. Biol. 172:45-5414; Vijayachandran L S, et al. (2011) J. Struct. Biol. 2011; 175:198-208). More recently, the design of transfer plasmids has been further refined, resulting in small, easy to handle plasmids containing only the functional DNA elements required for protein expression, expression cassette multiplication and plasmid concatenation by TR (Vijayachandran L S, et al. (2011) J. Struct. Biol. 175:198-208). Multigene transfer vectors created in this way are introduced into the MultiBac baculovirus genome by the Tn7 transposon, in E. coli strains modified for this purpose (Trowitzsch S, et al. (2010) supra).

[0006] As a step forward relative to previous systems, the original MultiBac system already provided the option to integrate accessory functionalities that may be required for proper functioning of a multiprotein complex, by means of a second entry site engineered into the virus genome that is independent of, and distal to the main site of integration that relies on the Tn7 transposition. This feature has been exploited to integrate additional functional modules into the viral genome, including post translational modification enzymes, and fluorescent proteins that allow easy monitoring of virus performance and protein production following transfection and during virus amplification (Vijayachandran L S, et al. (2011) and Fitzgerald D J, et al. (2007) Structure 15:275-9). More recently, this approach has been used to create SweetBac, allowing for the production of mammalian-like glycoproteins in insect cells (Palmberger D et al. (2012) PloS One 7:e34226 and Palmberger D et al. (2012) Bioengineered 2012; 4). MultiBac is now in use at more than 600 laboratories world-wide, in academia and industry, and a broad range of multiprotein complexes have been produced in high quality and quantity for diverse applications by using the MultiBac system (Trowitzsch S et al. (2012) supra; Nettleship J E et al. (2010) supra; Kriz A et al. (2010) supra; Summers M D (2005) supra; Jarvis D L (2009) Methods Enzymol. 463:191-222 and Bieniossek C (2012) Trends Biochem. Sci. 37:49-57).

[0007] Currently, two approaches for integrating heterologous expression cassettes into the baculovirus genome dominate the field. One of these approaches requires the presence of the baculoviral genome as a bacterial artificial chromosome (BAC) in E. coli cells, together with Tn7 transposase activity present in these same cells which recombine transformed transfer plasmids into a Tn7 attachment site on the BAC. Invitrogen's Bac-to-Bac system and also the more advanced MultiBac system both utilize this approach. The recombinant, composite baculovirus DNA is then purified from these E. coli cells by alkaline lysis, and used to transfect insect cells. In contrast, the original method of choice to integrate heterologous expression cassettes into the baculovirus genome relied on homologous recombination mediated by regions in the transfer plasmid that were homologous to two genes on the baculovirus genome (Orf1629 and lef2/603) that flank the baculoviral polh locus which had been inactivated. This method is still offered by a large number of commercial providers (Novagen BacVector series, Pharmingen BaculoGold, Abvector, others). By this method, homologous recombination occurs in insect cells following transfection the baculovirus genomic DNA together with the transfer vector. The efficiency of recombination is increased by linearization of the baculovirus genome, but still remains a less efficient method to rapidly generate recombinant baculovirus than transforming Tn7-produced composite BACs. A further improvement on the homologous recombination in insect cell method came by truncation of the essential Orf1629 gene on the baculovirus genome which is then repaired by co-transfecting complete Orf1629-containing transfer vectors (FlashBac system, Oxford Expresion Technologies, UK).

[0008] Currently, BEVS applications including MultiBac rely on a large baculovirus genome (130 kb) derived from wild-type Autographa californica multicapsid nuclear polyhedrosis virus (AcMNPV). This genome has been intensively researched for many years. Genes that are essential for propagation in cell culture and genes which are detrimental for foreign protein production were delineated by several research groups (Harrison R L t al. (2003) J. Gen. Virol. 2003; 84:1827-42; Pijlman G P et al. (2001) Virology 283:132-8; Pijlman G P et al. (2002) J. Virol. 76:5605-11; Pijlman G P t al. (2003) J. Gen. Virol. 84:2041-9; Pijlman G P et al. (2006), J. Biotechnol. 123:13-21; Pijlman G P at al. (2003) J. Gen. Virol. 2003; 84:2669-78 and Pijlman G P t al. (2003) J. Invertebr. Pathol. 84:214-9).

[0009] The inherent DNA instability of the currently used baculovirus genome poses a problem, in particular at expression scales relevant for pharmaceutical production. Simply speaking, as the virus replicates during expression scale up, it progressively suffers from deletion of bits and pieces of its genome, preferentially in the highly expressed, (non-essential) heterologous protein expression cassette, as was shown already for laboratory scale production (Fitzgerald D J (2006) Nat. Methods 3:1021-32; Pijlman G P (2001) Virology 283:132-8; Pijlman G P et al. (2002), J. Virol. 76:5605-11). This is exacerbated for the viruses of the BAC/Tn7 type by the fact that the insertion site which is targeted by the Tn7 transposon is actually a mutational hotspot (Carstens E B t al. (1987) J. Gen. Virol. 68:901-5; Roelvink P W et al. (1992) J. Gee. Virol. 73 (Pt 6):1481-9).

[0010] Accordingly, there is a need in the art to provide expression systems which allow efficient protein expression, accommodate large heterologous nucleotide inserts, e.g. to express multiple proteins and which are less prone to rearrangement of the genome, i.e. with improved genomic stability.

### SUMMARY OF THE INVENTION

[0011] In a first aspect the present invention relates to a nucleopolyhedrovirus (NPV)-alpha baculovirus clade Ia genome, wherein the number of base pairs is reduced in comparison to a native NPV-alpha baculovirus clade Ia genome by more than 18%, preferably an Autographa californica multicapsid nucleopolyhedrovirus (AcMNPV) genome, wherein the number of base pairs of the genome is reduced in comparison to a native BmNPV genome by at least at least 25.7% or a Bombyx mori nucleopolyhedrovirus (BmNPV) genome, wherein the number of base pairs of the genome is reduced in comparison to a native BmNPV genome by at least 18.31% and which in each case assembles into an infectious baculovirus.

[0012] In a second aspect the present invention relates to a NPV alpha baculovirus clade Ia genome according to the first aspect further comprising a nucleotide sequence heterologous to the NPV alpha baculovirus clade Ia genome.

[0013] In a third aspect the present invention relates to an infectious NPV alpha baculovirus clade Ia virus comprising a genome according to the first or second asp t of the invention.

[0014] In a fourth aspect the present invention relates to a cell infected with a virus according to the third aspect of the invention.

[0015] In a fifth aspect the present invention relates to a method for producing an NPV alpha baculovirus clade Ia genome according to the first or second aspect of the invention comprising the step of chemically synthesizing all or part of the genome.

[0016] In a sixth aspect the present invention relates to a method for producing an NPV alpha baculovirus clade Ia virus by introducing a genome according to the first or second aspect of the invention or producible according to the method of the fifth aspect into a cell.

### DETAILED DESCRIPTION OF THE INVENTION

[0017] Before the present invention is described in detail below, it is to be understood that this invention is not limited to the particular methodology, protocols and reagents described herein as these may vary. It is also to be understood that the terminology used herein is for the purpose of describing particular embodiments only, and is not intended to limit the scope of the present invention which will be limited only by the appended claims. Unless defined otherwise, all technical and scientific terms used herein have the same meanings as commonly understood by one of ordinary skill in the art.

[0018] In the following, the elements of the present invention will be described. These elements are listed with specific embodiments, however, it should be understood that they may be combined in any manner and in any number to create additional embodiments. The variously described examples and preferred embodiments should not be construed to limit the present invention to only the explicitly described embodiments. This description should be understood to support and encompass embodiments which combine the explicitly described embodiments with any number of the disclosed and/or preferred elements. Furthermore, any permutations and combinations of all described elements in this application should be considered disclosed by the description of the present application unless the context indicates otherwise.

[0019] Several documents are cited throughout the text of this specification. Each of the documents cited herein (including all patents, patent applications, scientific publications, manufacturer's specifications, instructions, etc.), whether supra or infra, are hereby incorporated by reference in their entirety. Nothing herein is to be construed as an admission that the invention is not entitled to antedate such disclosure by virtue of prior invention.

### DEFINITIONS

[0020] To practice the present invention, unless otherwise indicated, conventional methods of chemistry, biochemistry, and recombinant DNA techniques are employed which are explained in the literature in the field (cf., e.g., Molecular Cloning: A Laboratory Manual, 2^{th} Edition, J. Sambrook et al. eds., Cold Spring Harbor Laboratory Press, Cold Spring Harbor 1989).

[0021] Throughout this specification and the claims which follow, unless the context requires otherwise, the word “comprise”, and variations such as “comprises” and “comprising”, will be understood to imply the inclusion of a stated integer or step or group of integers or steps but not the exclusion of any other integer or step or group of integers or steps. As used in this specification and the appended claims, the singular forms “a”, “an”, and “the” include plural referents, unless the content clearly dictates otherwise.

[0022] The terms “polynucleotide” and “nucleic acid” are used interchangeably herein and are understood as a polymeric or oligomeric macromolecule made from nucleotide monomers.

[0023] Nucleotide monomers are composed of a nucleobase, a five-carbon sugar (such as but not limited to ribose or 2′-deoxyribose), and one to three phosphate groups. Typically, a polynucleotide is formed through phosphodiester bonds between the individual nucleotide monomers. In the context of the present invention referred to nucleic acid molecules include but are not limited to ribonucleic acid (RNA), deoxyribonucleic acid (DNA), and mixtures thereof such as e.g. RNA-DNA hybrids. The nucleic acids, can e.g. be synthesized chemically, e.g. in accordance with the phosphotriester method (see, for example, Uhlmann, E. & Peyman, A. (1990) Chemical Reviews, 90, 543-584). “Aptamers” are nucleic acids which bind with high affinity to a polypeptide. Aptamers can be isolated by selection methods such as SELEmir146-a (see e.g. Jayasena (1999) Clin. Chem., 45, 1628-50; Klug and Famulok (1994) M. Mol. Biol. Rep., 20, 97-107; U.S. Pat. No. 5,582,981) from a large pool of different single-stranded RNA molecules. Aptamers can also be synthesized and selected in their mirror-image form, for example as the L-ribonucleotide (Nolte et al. (1996) Nat. Biotechnol., 14, 1116-9; Klussmann et al. (1996) Nat. Biotechnol., 14, 1112-5). Forms which have been isolated in this way enjoy the advantage that they are not degraded by naturally occurring ribonucleases and, therefore, possess greater stability.

[0024] The terms “protein” and “polypeptide” are used interchangeably herein and refer to any peptide-bond-linked chain of amino acids, regardless of length or post-translational modification. Proteins usable in the present invention (including protein derivatives, protein variants, protein fragments, protein segments, protein epitops and protein domains) can be further modified by chemical modification. This means such a chemically modified polypeptide comprises other chemical groups than the 20 naturally occurring amino acids. Examples of such other chemical groups include without limitation glycosylated amino acids and phosphorylated amino acids. Chemical modifications of a polypeptide may provide advantageous properties as compared to the parent polypeptide, e.g. one or more of enhanced stability, increased biological half-life, or increased water solubility.

[0025] The term “sequence identity” is used throughout the specification with regard to polypeptide and polynucleotide sequence comparisons. In case where two sequences are compared and the reference sequence is not specified in comparison to which the sequence identity percentage is to be calculated, the sequence identity is to be calculated with reference to the longer of the two sequences to be compared, if not specifically indicated otherwise. If the reference sequence is indicated, the sequence identity is determined on the basis of the full length of the reference sequence indicated by SEQ ID, if not specifically indicated otherwise. For example, a polypeptide sequence consisting of 200 amino acids compared to a reference 300 amino acid long polypeptide sequence may exhibit a maximum percentage of sequence identity of 66.6% (200/300) while a sequence with a length of 150 amino acids may exhibit a maximum percentage of sequence identity of 50% (150/300). If 15 out of those 150 amino acids are different from the respective amino acids of the 300 amino acid long reference sequence, the level of sequence identity decreases to 45%. The similarity of nucleotide and amino acid sequences, i.e. the percentage of sequence identity, can be determined via sequence alignments. Such alignments can be carried out with several art-known algorithms, preferably with the mathematical algorithm of Karlin and Altschul (Karlin & Altschul (1993) Proc. Natl. Acad. Sci. USA 90: 5873-5877), with hmmalign (HMMER package, http://hmmer.wustl.edu/) or with the CLUSTAL algorithm (Thompson, J. D., Higgins, D. G. & Gibson, T. J. (1994) Nucleic Acids Res. 22, 4673-80) available e.g. on http://www.ebi.ac.uk/Tools/clustalw/or on httpJ/www.ebi.ac.uk/Tools/clustalw2/index.html or on http://npsa-pbil.ibcp.fr/cgi-bin/npsa_automat.pl?page=/NPSA/npsa_clustalw.htmi. Preferred parameters used are the default parameters as they are set on http://www.cbi.ac.uktTools/clustalw/or http://www.ebi.ac.ukfTools/clustalw2/index.html. The grade of sequence identity (sequence matching) may be calculated using e.g. BLAST, BLAT or BlastZ (or BlastX). A similar algorithm is incorporated into the BLASTN and BLASTP programs of Altschul et al. (1990) J. Mol. Biol. 215: 403-410. BLAST polynucleotide searches are performed with the BLASTN program, score=100, word length=12. BLAST protein searches are performed with the BLASTP program, score=50, word length=3. To obtain gapped alignments for comparative purposes, Gapped BLAST is utilized as described in Altschul et al. (1997) Nucleic Acids Res. 25: 3389-3402. When utilizing BLAST and Gapped BLAST programs, the default parameters of the respective programs are used. Sequence matching analysis may be supplemented by established homology mapping techniques like Shuffle-LAGAN (Brudno M., Bioinformatics 2003b, 19 Suppl 1:154-162) or Markov random fields. When percentages of sequence identity are referred to in the present application, these percentages are calculated in relation to the full length of the longer sequence, if not specifically indicated otherwise. “Hybridization” can also be used as a measure of sequence identity or homology between two nucleic acid sequences. A nucleic acid sequence encoding F, N, or M2-1, or a portion of any of these can be used as a hybridization probe according to standard hybridization techniques. Hybridization conditions are known to those skilled in the art and can be found, for example, in Current Protocols in Molecular Biology, John Wiley & Sons, N. Y., 6.3.1-6.3.6, 1991. “Moderate hybridization conditions” are defined as equivalent to hybridization in 2× sodium chloride/sodium citrate (SSC) at 30° C., followed by a wash in 1×SSC, 0.1% SDS at 50° C. “Highly stringent conditions” are defined as equivalent to hybridization in 6× sodium chloride/sodium citrate (SSC) at 45° C., followed by a wash in 0.2×SSC, 0.1% SDS at 65° C.

[0026] As used herein, the terms “resistance gene” refers to a gene conferring resistance to a toxin and/or an antibiotic”. Accordingly, such a gene may also be referred to as “toxin-resistance gene” or “antibiotica-resistance gene”. The functional inactivation of a toxin or antibiotic may be achieved by expressing a marker gene which carries mutation(s) rendering the respective gene product insensitive to a toxin or antibiotic. Alternatively, the functional inactivation of a toxin or antibiotic may be achieved by expressing a marker gene which inhibits the toxin or antibiotic e.g. by interacting or binding to it. The functional inactivation of a toxin or antibiotic may also be achieved by expressing a marker gene which counteracts the effects of the toxin or antibiotic.

[0027] Antibiotic compounds include but are not limited to tetracyclines, sulfonamides, penicillins, cephalosporins, ansamycins, carbapenems, macrolides, quinolones, aminonucleoside, aminoglycosides, peptides, glycopeptides, and lipopeptides. Exemplified, hygromycin B, neomycin, kanamycin, gentamicin, and G418 (also known as Geneticin) are aminoglycoside antibiotics which are similar in structure. In general, neomycin and kanamycin are used for prokaryotes, whilst G418 is needed for eukaryotes. Kanamycin is isolated from Streptomyces kanamyceticus and interacts with the 30S subunit of prokaryotic ribosomes thereby inducing mistranslation and indirectly inhibiting translocation during protein synthesis. Neomycin is produced naturally by the bacterium Streptomyces fradiae whilst G418 is produced by Micromonospora rhodoranges. Neomycin blocks protein biosynthesis by binding to the 30S subunit of the 70S-ribosome. G418 blocks polypeptide synthesis by binding to the 80S-ribosome and thereby inhibiting the elongation step in both prokaryotic and cukaryotic cells. Resistance to neomycin and G418 is conferred by the Neor gene from transposon Tn5 encoding an aminoglycoside 3′-phosphotransferase, APH 3′ II which phosphorylates neomycin or geneticin on a hydroxygroup and thereby, inhibits its function. Hygromycin B is produced by the bacterium Streptomyces hygroscopicus and kills bacteria, fungi and higher eukaryotic cells by inhibiting protein synthesis. The hygromycin resistance gene Hph encodes the hygromycin B phosphotransferase which inactivates hygromycin B through phosphorylation. Blasticidin is an antibiotic that is produced by Streptomyces griseochromogenes and prevents the growth of both eukaryotic and prokaryotic cells by inhibiting peptide bond formation by the ribosome. The three genes bis from Streptoverticillum sp., bsr from Bacillus cereus, and BSD from Aspergillus terreus, confer resistance to blasticidin by enabling the cells continue protein production even in the presence of blasticidin. Puromycin is an aminonucleoside antibiotic, derived from the Streptomyces alboniger that causes premature chain termination during translation taking place in the ribosome. The expression of the report gene Puror encodes a puromycin N-acetyl-transferase which conveys resistance to the antibiotic puromycin. In the context of the present invention genes conveying antibiotic-resistance are particularly suitable, including but not limited to genes conveying resistance to neomycin, puromycin, blasticidin and hygromycin.

### Embodiments

[0028] To provide improved expression systems the present inventors decided to rewire the entire baculovirus genome to maximize its performance. The aim was the redesign and restructuring of the baculovirus genome to provide among other advantages enhanced DNA stability and efficient protein production. The genes and DNA elements which are dispensable under laboratory culture conditions and unnecessary for efficient budded viral production, which is the major virus type used for protein expression in cell culture (Bieniossek C et al. (2008) supra and Fitzgerald D J et al (2006) Nat. Methods 3:1021-32) have been determined by the present inventors. This allowed engineering an improved baculovirus genome by removing non-essential genes and regions prone to mutation. Such engineered viruses provide among other advantages improved virus DNA stability, increased ability of accommodating very large foreign gene insertions, without compromising the ease of handling and superior protein production properties.

[0029] The present inventors surprisingly found that the size of the genome of a NPV-alpha baculovirus clade Ia genome can be significantly reduced without affecting its ability to infect and propagate in cells. Viruses comprising such an optimized genome provide enhanced DNA stability and more efficient protein production. Thus, in a first aspect this invention provides a genome of a nucleopolyhedrovirus (NPV)-alpha baculovirus clade Ia virus, wherein the number of base pairs is reduced in comparison to a native NPV-alpha baculovirus clade Ia genome by more than 18% and which assembles into an infectious baculovirus, e.g. under the conditions outlined below, preferably a genome of an Autographa californica multicapsid nucleopolyhedrovirus (AcMNPV), wherein the number of base pairs of the genome is reduced in comparison to a native AcMNPV genome by at least 25.7% or a Bombyx mori nucleopolyhedrovirus (BmNPV) genome, wherein the number of base pairs of the genome is reduced in comparison to a native BmNPV genome by at least 18.31% and which in each case assembles into an infectious baculovirus.

[0030] Preferably, the genome assembles into an infectious baculovirus capable of expressing heterologous proteins, once it infects a permissible cell.

[0031] The genomes of baculoviruses belonging to the group of NPV alpha baculovirus clade Ia are highly conserved. Thus, in the following the coding segments (CDS), 5′ untranslated regions (UTRs), spacers and/or repeat sequences (br) to be deleted or maintained are always indicated with reference to the genome of AcMNPV or BmNPV. If nucleotide positions are indicated these are either with reference to the genome of AcMNPV according to SEQ ID NO: 1 or of BmNPV according to SEQ ID NO: 4. Based on this information the skilled person can determine without undue burden the corresponding CDS, UTR, spacer or hr sequence of another NPV alpha baculovirus clade Ia virus by using standard alignment tools as set out above. The result of such an approach is exemplary described for the ptp gene encoding a protein tyrosine phosphatase of AcMNPV (UniProt P24656, SEQ ID NO: 13). When the amino acid sequence of SEQ ID NO: 13 is used in a PBLAST search of non-redundant protein sequences the homologs of the protein tyrosine phosphatase of AcMNPV from other NPV alpha baculovirus clade Ia viruses are identified, e.g. a homolog from Rachiplusia ou multiple nucleopolyhedrovirus (RoMNPV) (Accession NO: NP_{—}702993; SEQ ID NO: 14), a homolog from BmNPV (Accession No: AAG31657; SEQ ID NO: 15), a homolog from Maruca vitrata multiple nuclopolyhcdrovirus (MaviMNPV) (Accession No.: YP_{—}950853; SEQ ID NO: 16), a homolog from Choristoneura fumiferana defective nucleopolyhedroviru (CfDefMNPV) (Accession No.: NP_{—}932617; SEQ ID NO: 17), a homolog of Anticarsia gemmatalis multiple nucleopolyhedrovirus (AgMNPV) (Accession No.: YP_{—}803403; SEQ ID NO: 18), a homolog from Epiphyas postvittana nucleopolyhedrovirus (EppoNPV) (Accession No: NP_{—}203176; SEQ ID NO: 19), a homolog from Antheraea pernyi nucleopolyhedrovirus (AnpeNPV) (Accession No.: YP_{—}611104; SEQ ID NO: 20), a homolog from Choristoneura Fumiferana Multinucleocapsid nucleopolyhedrovirus (CfMNPV) (Accession No.: NP_{—}848321; SEQ ID NO: 21), a homolog from Orgyia Pseudotsugata Multicapsid nucleopolyhedrovirus (OpMNPV) (Accession No.: NP_{—}046166; SEQ ID NO: 22), and a bomolog from Hyphantria cunea nucleopolyhedrovirus (HycuNPV) (Accession No: YP_{—}473330; SEQ ID NO: 23). The alignment of these sequences using CLUSTALW2 is shown in FIG. 2. It is clear that the ptp protein is highly conserved among different NPV alpha baculovirus clade Ia viruses. Accordingly, if the ptp gene is deleted in a NPV alpha baculovirus clade Ia virus this means that at least the CDS encoding the ptp protein in the respective NPV alpha baculovirus clade Ia virus is deleted. It is preferred that also the 5′-UTR of the respective CDS is deleted. In the following reference is always made to genes encoding specific NPV alpha baculovirus clade Ia virus proteins. To unambiguously identify the respective gene the UniProt reference number of the protein of AcMNPV or BmNPV is indicated. Nevertheless, the homologs of that gene in other NPV alpha baculovirus clade Ia virus are also referred to. Similarly, the 5′ and 3′ end of a CDS, 5′-UTR, hr or spacer are always indicated with reference to the AcMNPV genome according to SEQ ID NO: 1 or with reference to the genome of BmNPV, however, include the homologous regions from other NPV alpha baculovirus clade Ia virus, which can be identified by the skilled person without undue burden by alignment of the referenced CDS, 5′UTRs, hrs and spacers, respectively, of (i) the AcMNPV genome according to SEQ ID NO: 1, (ii) the BmNPV genome according to SEQ ID NO: 4 or (iii) the AcMNPV genome according to SEQ ID NO: 1 and the BmNPV genome according to SEQ ID NO: 4 with the genome of the other NPV alpha baculovirus clade Ia virus. While the NPV alpha baculoviruses are highly conserved amongst each other, it is possible that for a given AcMNPV or BmNPV CDS, 5′-UTR, hr and/or spacer region to be deleted no homologous region can be identified in the baculovirus to be modified. This may be due to the fact that the particular NPV clade Ia virus may have lost this genomic segment naturally and, thus, that it will not be possible to delete a genomic segment homologous to the reference segment of AcMNPV and/or BmNPV. In the determination of homologous segments it is preferred that the reference nucleotide sequence to be deleted or maintained and the nucleotide sequence from another clade Ia baculovirus show an identity of at least 60%, 65%, 70%, 75, 80%, 85%, 90%, 95% or even 100%. If a homologous segment for a CDS is determined it is preferred that the sequence comparison is carried out on the basis of the encoded amino acid rather than on the basis of the coding sequence. It is then preferred that a homologous protein shows an amino acid identity of at least 70%, 75, 80%, 85%, 90%_{,} 95% or even 100% with the reference amino acid sequence of the AcMNPV or BmNPV protein.

[0032] Preferably the size of the NPV alpha baculovirus clade Ia genome is reduced by at least 20%, more preferably by at least 22%, at least 24%, at least 26%, at least 28% at least 30% at least 32%, at least 34%, at least 36% at least 38%, or at least 40% % by following the teaching in this application, which genes to maintain and to delete with respect to the native genome of the respective virus to arrive at the genome with a reduced size of the present invention.

[0033] Preferably the size of genome of AcMNPV is reduced by at least 26%, at least 28% at least 30% at least 32%, at least 34%, at least 36% at least 38%, at least 40%, Preferably the size of genome of BmNPV is reduced by at least 20%, more preferably by at least 22%, at least 24%, at least 26%, at least 28% at least 30% at least 32%, at least 34%, at least 36% at least 38%, or at least 40%.

[0034] Preferably the size of genome of RoMNPV is reduced by at least 20%, more preferably by at least 22%, at least 24%, at least 26%, at least 28% at least 30% at least 32%, at least 34%, at least 36% at least 38%, or at least 40%.

[0035] Preferably the size of genome of MaviMNPV is reduced by at least 20&, more preferably by at least 22%, at least 24%, at least 26%, at least 28% at least 30% at least 32%, at least 34%, at least 36% at least 38%, or at least 40%.

[0036] Preferably the size of genome of CfDefMNPV is reduced by at least 20%, more preferably by at least 22%, at least 24%, at least 26%, at least 28% at least 30% at least 32%, at least 34%, at least 36% at least 38%, or at least 40%.

[0037] Preferably the size of genome of AgMNPV is reduced by at least 20%, more preferably by at least 22%, at least 24%, at least 26%, at least 28% at least 30% at least 32%, at least 34%, at least 36% at least 38%, or at least 40%.

[0038] Preferably the size of genome of EppoNPV is reduced by at least 20%, more preferably by at least 22%, at least 24%, at least 26%, at least 28% at least 30% at least 32%, at least 34%, at least 36% at least 38%, or at least 40%.

[0039] Preferably the size of genome of AnpeNPV is reduced by at least 20%, more preferably by at least 22%, at least 24%, at least 26%, at least 28% at least 30% at least 32%, at least 34%, at least 36% at least 38%, or at least 40%.

[0040] Preferably the size of genome of CfMNPV is reduced by at least 20%, more preferably by at least 22%, at least 24%, at least 26%, at least 28% at least 30% at least 32%, at least 34%, at least 36% at least 38%, or at least 40%.

[0041] Preferably the size of genome of OpMNPV is reduced by at least 20% o, more preferably by at least 22%, at least 24%, at least 26%, at least 28%, at least 30% at least 32%, at least 34%, at least 36% at least 38%, or at least 40%.

[0042] Preferably the size of genome of HycuNPV is reduced by at least 20%, more preferably by at least 22%, at least 24%, at least 26%, at least 28% at least 30% at least 32%, at least 34%, at least 36% at least 38%, or at least 40%.

[0043] Preferably the size of genome of Plutella xylostella nucleopolyhedrovirus (PlxyNPV) is reduced by at least 20%, more preferably by at least 22%, at least 24%, at least 26%, at least 28% at least 30%, at least 32%, at least 34%, at least 36% at least 38%, or at least 40%.

[0044] In above and below part of the description the reduction in size is always expressed as a percentage of the reduction in comparison to a native baculovirus genome. Alternatively the reduction in size may also be indicated in absolute values, i.e. reduction in size by X base pairs. The length of the CDS, 5′-UTR, spacer and hr segments, respectively, in base pairs are indicated in detail below in Tables 1 to 12 for AcMNPV and BmNPV (see column labeled “bp” in each Table). The sum of the bp of the respectively indicated elements will determine the number of base pairs that the baculovirus genome is shortened with respect to the native baculovirus genome, preferably those according to SEQ ID NO: 1 or 15. Using the teaching on how to identify homologous regions in other Clade Ia viruses by sequence alignment the skilled person can also determine the length of the homologous segments in other Clade Ia viruses and add the number of base pairs of the homologous sequences to be deleted to arrive at the value for absolute reduction of the length of the native genome of that particular Clade Ia baculovirus.

[0045] The present inventors have found that the CDS/proteins indicated below can be deleted without detrimeantal effect on the respective NPV alpha baculovirus clade Ia virus (all CDS and proteins are with reference to the genome of AcMNPV and BmNPV, respectively).

[0046] The present inventors found that the CDS indicated below in Tables 1a can be deleted without detrimental effect on AcMNPV. Further, the CDS indicated below in Tables 1b can be deleted without detrimental effect on BmNPV. These CDS are considered to belong to a group that is referred to as Type I of the respective NPV alpha baculovirus clade Ia virus (all CDS and proteins are with reference to AcMNPV). Accordingly, the deletion of these CDS (and preferably also the respective 5′-UTR, spacer and/or hr regions) are referred to as Type I deletions:

TABLE 1a
AcMNPV

| Name | UniProt | Definition | aa | bp | Start | Stop | Strand |
|---|---|---|---|---|---|---|---|
| Ptp | P24656 | protein tyrosine phosphatase | 168 | 507 | 503 | 1009 | plus |
| Bro | P24655 | baculovirus repeated ORF | 328 | 987 | 1041 | 2027 | minus |
| Ctx | P41416 | conotoxin-like peptide | 53 | 162 | 2084 | 2245 | minus |
| orf603 | P24650 | hypothetical protein ACNVgp007 | 201 | 606 | 3759 | 4364 | minus |
| polyhedrin | P04871 | major occlusion body protein | 245 | 738 | 4520 | 5257 | plus |
| Egt | P18569 | ecdysteroid UDP-glucosyl | 506 | 1521 | 11426 | 12946 | plus |
| | | transferase | | | | | |
| bv/odv-e26 | P12827 | AcOrf-16 peptide | 225 | 678 | 13092 | 13769 | plus |
| ac18 | P12828 | AcOrf-18 peptide | 353 | 1062 | 14398 | 15459 | minus |
| pif-2 | P41427 | AcOrf-22 peptide | 382 | 1149 | 17301 | 18449 | plus |
| env-prot | P41428 | copia-like envelope protein | 690 | 2073 | 18513 | 20585 | plus |
| iap-1 | P41435 | apoptosis inhibitor | 286 | 861 | 22600 | 23460 | plus |
| Sod | P24705 | superoxide dismutase | 151 | 456 | 25820 | 26275 | plus |
| Fgf | P41444 | fibroblast growth factor | 181 | 546 | 27041 | 27586 | minus |
| v-ubi | P16709 | viral ubiquitin | 77 | 234 | 28962 | 29195 | plus |
| p43 | P34050 | hypothetical protein ACNVgp039 | 363 | 1092 | 31078 | 32169 | minus |
| odv-e66 | Q00704 | occlusion-derived virus envelope | 704 | 2115 | 36718 | 38832 | plus |
| | | protein | | | | | |
| gp37 | P23058 | fusolin; spindle body protein; | 302 | 909 | 51283 | 52191 | minus |
| | | 34.8K; SLP; spheroidin-like | | | | | |
| | | protein; p34.8 | | | | | |
| odv-nc42 | P41468 | Virus structure | 192 | 579 | 58720 | 59298 | plus |
| ac69 | P41469 | putative methyl transferase | 262 | 789 | 59276 | 60064 | plus |
| iap-2 | P41454 | apoptosis inhibitor | 249 | 750 | 61016 | 61765 | plus |
| pnk/pnl | P41476 | polynucleotide kinase/ligase; | 694 | 2085 | 72131 | 74215 | minus |
| | | pnk | | | | | |
| ac91 | P41479 | AcOrf-91 peptide | 224 | 675 | 77987 | 78661 | minus |
| odv-e28 | P41656 | pif-4 AcOrf-96 peptide | 173 | 522 | 84346 | 84867 | plus |
| pif-4 | | | | | | | |
| pif-3 | P41668 | AcOrf-115 peptide | 204 | 615 | 99182 | 99796 | minus |
| pif-1 | P41672 | AcOrf-119 peptide | 530 | 1593 | 100699 | 102291 | plus |
| pk-2 | P41676 | protein kinase, GCN2-like kinase | 215 | 648 | 102964 | 103611 | minus |
| chiA | P41684 | chitinase | 551 | 1656 | 105282 | 106937 | minus |
| v-cath | P25783 | viral cathepsin-like protein | 323 | 972 | 106983 | 107954 | plus |
| pp34 | P24728 | major polyhedral calyx protein | 252 | 759 | 110903 | 111661 | plus |
| 94K | P08161 | hypothetical protein ACNVgp135 | 803 | 2412 | 113870 | 116281 | minus |
| p26 | P08358 | hypothetical protein ACNVgp137 | 240 | 723 | 118044 | 118766 | plus |
| p10 | P04870 | fibrous body protein | 94 | 285 | 118839 | 119123 | plus |
| p74 | P15963 | occlusion-derived virus envelope | 645 | 1938 | 119135 | 121072 | minus |
| | | protein, pif | | | | | |
| ac145 | P41703 | AcOrf-145 peptide | 77 | 234 | 126299 | 126532 | plus |
| odv-e56 | P41705 | occlusion-derived virus envelope | 376 | 1131 | 129008 | 130138 | minus |
| | | protein | | | | | |
| ac150 | P41707 | AcOrf-150 peptide | 99 | 300 | 130456 | 130755 | plus |

TABLE 1b
BmNPV

| Name | UniProt | Definition | aa | bp | Start | Stop | Strand |
|---|---|---|---|---|---|---|---|
| Polyhedrin | 1724487 | Polyhedrin | 245 | 738 | 1 | 738 | plus |
| Egt | 1488637 | UDP-l | 506 | 1521 | 6407 | 7927 | plus |
| | | Glucosy | | | | | |
| | | Transferase | | | | | |
| bv/odv-e26 | 1488639 | BV/ODV- | 229 | 690 | 8067 | 8756 | plus |
| | | E26 | | | | | |
| bm10 ac18 | 1488641 | AcMNPV | 356 | 1071 | 9387 | 10457 | minus |
| | | orf18 | | | | | |
| pif-2 | 1488644 | AcMNPV | 382 | 1149 | 12335 | 13483 | plus |
| | | orf22 | | | | | |
| env-prot | 1488645 | AcMNPV | 673 | 2022 | 13586 | 16607 | plus |
| | | orf23 | | | | | |
| iap-1 | 1488649 | IAP1 | 292 | 879 | 17606 | 18484 | plus |
| Fgf | 1488656 | FGF | 182 | 549 | 23407 | 23955 | plus |
| v-ubi | 1724483 | Ubiquitin | 77 | 234 | 25035 | 25268 | plus |
| bm57 ac69 | 1488688 | AcMNPV | 262 | 789 | 54440 | 55228 | plus |
| | | orf69 | | | | | |
| bm74 ac91 | 1488706 | AcMNPV | 154 | 465 | 69985 | 70449 | minus |
| | | orf91 | | | | | |
| pif-3 | 1488726 | AcMNPV | 204 | 615 | 91385 | 91999 | minus |
| | | orf115 | | | | | |
| pif-1 | 1488729 | AcMNPV | 527 | 1584 | 92532 | 94115 | plus |
| | | orf119 | | | | | |
| chi-a | 1724489 | CHITINASE | 552 | 1659 | 97049 | 98707 | minus |
| v-cath | 1724490 | Cystein | 323 | 972 | 98756 | 99727 | plus |
| | | Protease | | | | | |
| pp34 | 1488739 | PP34 | 315 | 948 | 102560 | 103507 | plus |
| bm110a | 1488742 | P94 | 57 | 174 | 105505 | 105678 | minus |
| 94K ac134 | | | | | | | |
| p26 | 1488745 | P26 | 240 | 723 | 107702 | 108424 | plus |
| p10 | 1488746 | P10 | 70 | 213 | 108497 | 108709 | plus |
| p74 | 1488747 | P74 | 645 | 1938 | 108796 | 110733 | minus |
| bm121/ | 1488753 | AcMNPV | 95 | 288 | 116041 | 116328 | plus |
| ac145 | | orf145 | | | | | |
| bm126 | 1488758 | AcMNPV | 115 | 348 | 120282 | 120629 | plus |
| ac150 | | orf150 | | | | | |
| Ptp | 1488762 | PTP | 168 | 507 | 124431 | 124937 | plus |
| bro-d | 1488763 | BRO-d | 349 | 1050 | 124934 | 126983 | Minus |
| Gta | 1488664 | GTA | 506 | 1521 | 30152 | 31672 | plus |
| gp37 | 1488684 | GP37 | 294 | 885 | 46479 | 47363 | minus |

[0047] The total length of the CDS encoding these portions is approximately 34,362 base pairs in AcMNPV according to SEQ ID NO: 1. Thus, the native AcMNPV genome according to SEQ ID NO: 1 of a length of 133,894 base pairs is preferably shortened by deletion of the CDS encoding these proteins and, thus, the AcMNPV genome of the invention is preferably at least 34,363 base pairs shorter than the native AcMNPV genome. The total length of the CDS encoding these proteins is approximately 24,531 base pairs in BmNPV. Thus, the native BmNPV genome having a length of 128,413 base pairs is preferably shortened by deletion of the CDS encoding these proteins and, thus, the BmNPV genome of the invention is preferably at least 25,121 base pairs shorter than the native BmNPV genome.

[0048] Accordingly, the AcMNPV genome of the invention is at least 25.7% shorter than the native AcMNPV genome. Accordingly, the BmNPV genome of the invention is at least 18.31% shorter than the native BmNPV genome.

[0049] For MvMNPV, the genome of the invention is preferably at least 21,688 bases pairs shorter than the native MvMNPV genome. For BmaMNPV, the genome of the invention is preferably at least 20,235 bases pairs shorter than the native BmaMNPV genome. For BmNPV, the genome of the invention is preferably at least 24,531 bases pairs shorter than the native BmNPV genome. For PlxyMNPV, the genome of the invention is preferably at least 26,724 bases pairs shorter than the native PlxyMNPV genome. For RoMNPV, the genome of the invention is preferably at least 26,379 bases pairs shorter than the native RoMNPV genome.

[0050] It is more preferred that one or more of the 5′-UTRs of these CDS are also deleted. In AcMNPV the 5′-UTRs of these CDS have a length of 2,113 base pairs. In BmNPV the 5′-UTRs of these CDS have a length of 1,614 base pairs. The following Tables 2a and 2b indicate the position of the 5′UTRs of the CDS deleted in preferred genomes of the invention. The 5′-UTR precedes the respectively indicated CDS Start codon by the indicated number of base pairs:

TABLE 2a
AcMNPV

| Name | GeneID | Start | Stop | Strand | Bp |
|---|---|---|---|---|---|
| ptp | 1403833 | 503 | 1009 | Plus | 57 |
| bro | 1403834 | 1041 | 2027 | minus | 56 |
| ctx | 1403835 | 2084 | 2245 | minus | 49 |
| orf603 | 1403839 | 3759 | 4364 | minus | 155 |
| polyhedrin | 1403840 | 4520 | 5257 | Plus | 155 |
| egt | 1403847 | 11426 | 12946 | Plus | 112 |
| bv/odv-e26 | 1403848 | 13092 | 13769 | Plus | 145 |
| ac18 | 1403850 | 14398 | 15459 | minus | 1 |
| pif-2 | 1403854 | 17301 | 18449 | Plus | 36 |
| env-prot | 1403855 | 18513 | 20585 | Plus | 63 |
| iap-1 | 1403859 | 22600 | 23460 | Plus | 1 |
| sod | 1403863 | 25820 | 26275 | Plus | 113 |
| fgf | 1403864 | 27041 | 27586 | minus | 146 |
| v-ubi | 1403867 | 28962 | 29195 | Plus | 20 |
| p43 | 1403871 | 31078 | 32169 | minus | 7 |
| odv-e66 | 1403878 | 36718 | 38832 | Plus | −16 |
| gp37 | 1403897 | 51283 | 52191 | minus | 137 |
| odv-nc-42 | 1403901 | 58720 | 59298 | Plus | −159 |
| ac69 | 1403902 | 59276 | 60064 | Plus | −23 |
| iap-2 | 1403904 | 61016 | 61765 | Plus | 33 |
| pnk/pnl | 1403919 | 72131 | 74215 | minus | 140 |
| ac91 | 1403924 | 77987 | 78661 | minus | 37 |
| odv-e28 | 1403929 | 84346 | 84867 | Plus | −14 |
| pif-3 | 1403948 | 99182 | 99796 | minus | 7 |
| pif-1 | 1403952 | 100699 | 102291 | Plus | −6 |
| pk-2 | 1403956 | 102964 | 103611 | minus | 181 |
| chiA | 1403959 | 105282 | 106937 | minus | 45 |
| v-cath | 1403960 | 106983 | 107954 | Plus | 45 |
| pp34 | 1403964 | 110903 | 111661 | Plus | 58 |
| 94K | 1403967 | 113870 | 116281 | minus | 210 |
| p26 | 1403969 | 118044 | 118766 | Plus | 56 |
| p10 | 1403970 | 118839 | 119123 | Plus | 72 |
| p74 | 1403971 | 119135 | 121072 | minus | 132 |
| ac145 + 18 | 1403978 | 126299 | 126532 | Plus | 69 |
| odv-e56 | 1403981 | 129008 | 130138 | minus | 28 |
| ac150 | 1403983 | 130456 | 130755 | Plus | −35 |

TABLE 2b
BmNPV

| Name | GeneID | Start | Stop | Strand | Bp |
|---|---|---|---|---|---|
| polyhedrin | 1724487 | 1 | 738 | plus | 129 |
| egt | 1488637 | 6407 | 7927 | plus | 114 |
| bv/odv-e26 | 1488639 | 8067 | 8756 | plus | −35 |
| bm10 ac18 | 1488641 | 9387 | 10457 | minus | 1 |
| pif-2 | 1488644 | 12335 | 13483 | plus | 36 |
| env-prot | 1488645 | 13586 | 15607 | plus | 102 |
| iap-1 | 1488649 | 17606 | 18484 | plus | 1 |
| fgf | 1488656 | 23407 | 23955 | plus | 206 |
| v-ubi | 1724483 | 25035 | 25268 | plus | 20 |
| bm57 ac69 | 1488688 | 54440 | 55228 | plus | −23 |
| bm74 ac91 | 1488706 | 69985 | 70449 | minus | 35 |
| pif-3 | 1488726 | 91385 | 91999 | minus | 7 |
| pif-1 | 1488729 | 92532 | 94115 | minus | 131 |
| chi-a | 1724489 | 97049 | 98707 | minus | 48 |
| v-cath | 1724490 | 98756 | 99727 | plus | 48 |
| pp34 | 1488739 | 102560 | 103507 | plus | 61 |
| bm110a | 1488742 | 105505 | 105678 | minus | −102 |
| 94K ac134 | | | | | |
| p26 | 1488745 | 107702 | 108424 | plus | 140 |
| p10 | 1488746 | 108497 | 108709 | plus | 72 |
| p74 | 1488747 | 108796 | 110733 | minus | 230 |
| bm121/ | 1488753 | 116041 | 116328 | plus | 14 |
| ac145 | | | | | |
| bm126 | 1488758 | 120282 | 120629 | plus | −32 |
| ac150 | | | | | |
| ptp | 1488762 | 124431 | 124937 | plus | 133 |
| bro-d | 1488763 | 124934 | 125983 | Minus | 74 |
| gta | 1488664 | 30152 | 31672 | plus | 75 |
| gp37 | 1488684 | 46479 | 47363 | minus | 129 |

[0051] The deletion of one or more of these 5′-UTRs from the genome of a NPV alpha baculovirus clade Ia virus leads to a further reduction of the size of the genome in comparison to the native genome of up to 1.58%. Accordingly, in an even more preferred embodiment the size of the genome of the AcMNPV virus of the invention is reduced by at least 27.24%. Accordingly, in an even more preferred embodiment the size of the genome of the BmNPV virus of the invention is reduced by at least 19.56%.

[0052] Alternatively or additionally the spacers of the AcMNPV CDS may be deleted, which amount to an additional deletion of 3,000 bp. In BmNPV the spacers of these CDS have a length of 3,047 base pairs. With reference to the nucleotide sequence of AcMNPV the spacers that may be deleted are the following:

TABLE 3a
AcMNPV

| Gene-Before | Gene-After | Start | Stop | bp |
|---|---|---|---|---|
| hr1 | ptp | 446 | 502 | 57 |
| ptp | bro | 1010 | 1040 | 31 |
| bro | ctx | 2028 | 2083 | 56 |
| ctx | Ac4 | 2246 | 2294 | 49 |
| lef2 | ORF603 | 3722 | 3758 | 37 |
| ORF603 | PH | 4365 | 4519 | 155 |
| PH | ORF1629 | 5258 | 5286 | 29 |
| lef1 | egt | 11314 | 11425 | 112 |
| egt | Ac16 | 12947 | 13091 | 145 |
| Ac17 | Ac18 | 14233 | 14397 | 165 |
| Ac18 | Ac19 | 15460 | 15460 | 1 |
| Ac22 | env-prot | 18450 | 18512 | 63 |
| env-prot | pkip | 20586 | 20633 | 48 |
| Ac26 | IAP1 | 22599 | 22599 | 1 |
| IAP1 | lef6 | 23461 | 23464 | 4 |
| Ac30 | sod | 25707 | 25819 | 113 |
| sod | hr2 | 26276 | 26292 | 17 |
| hr2 | fgf | 26962 | 27040 | 79 |
| fgf | HisP | 27587 | 27732 | 146 |
| Ac34 | v-ubi | 28942 | 28961 | 20 |
| v-ubi | 39K/pp31 | 29196 | 29241 | 46 |
| Ac38 | p43 | 31015 | 31077 | 63 |
| p43 | p47 | 32170 | 32176 | 7 |
| odv-e66 | Ac47 | 38833 | 38937 | 105 |
| Ac63 | gp37 | 51263 | 51282 | 20 |
| gp37 | DNA-pol | 52192 | 52328 | 137 |
| Ac69 | Ac70 | 60065 | 60109 | 45 |
| Ac70 | IAP2 | 60983 | 61015 | 33 |
| IAP2 | Ac72 | 61766 | 61823 | 58 |
| Ac85 | PNK/PNL | 72096 | 72130 | 35 |
| PNK/PNL | p15 | 74216 | 74355 | 140 |
| Ac91 | Ac92 | 78662 | 78698 | 37 |
| Ac122 | pk-2 | 102902 | 102963 | 62 |
| pk-2 | Ac124 | 103612 | 103792 | 181 |
| lef7 | chitinase | 105234 | 105281 | 48 |
| chitinase | v-cath | 106938 | 106982 | 45 |
| v-cath | gp64 | 107955 | 108178 | 224 |
| gp16 | PE/pp34 | 110845 | 110902 | 58 |
| PE/pp34 | Ac132 | 111662 | 111872 | 211 |
| 94K | 35K/p35 | 116282 | 116491 | 210 |
| hr5 | p26 | 117988 | 118043 | 56 |
| p26 | p10 | 118767 | 118838 | 72 |
| p10 | p74 | 119124 | 119134 | 11 |
| p74 | ME53 | 121073 | 121204 | 132 |
| odv-ec27 | Ac145 | 126230 | 126298 | 69 |
| IE-01 | odv-e56 | 128947 | 129007 | 61 |
| odv-e56 | Ac149 | 130139 | 130166 | 28 |
| Ac150 | IE-2 | 130756 | 130856 | 101 |

TABLE 3b
BmNPV

| Gene-After | Gene-before | Start | Stop | bp |
|---|---|---|---|---|
| Lef-2 | polyhedrin | 128285 | 128413 | 129 |
| Lef-1 | egt | 6293 | 6406 | 114 |
| bm9 ac17 | bm10 ac18 | 9358 | 9386 | 29 |
| bm17 ac26 | iap-1 | 17605 | 17605 | 1 |
| hr2L | fgf | 23201 | 23406 | 206 |
| bm25 ac34 | v-ubi | 25015 | 25034 | 20 |
| bm57 ac69 | iap2 | 55229 | 55376 | 148 |
| bm74 ac91 | bm75 ac92 | 70450 | 70484 | 35 |
| chi-a | v-cath | 98708 | 98755 | 48 |
| v-cath | gp64/67 | 99728 | 99843 | 116 |
| gp16 | pp34 | 102499 | 102559 | 61 |
| alk-exo | bm110a ac134 | 105463 | 105504 | 42 |
| hr5 | p26 | 107562 | 107701 | 140 |
| p26 | p10 | 108425 | 108496 | 72 |
| p10 | p74 | 108710 | 108795 | 86 |
| odv-ec27 | bm121 ac145 | 116027 | 116040 | 14 |
| bm126 | ie-2 | 120630 | 120661 | 32 |
| ac150 | | | | |
| hr1 | ptp | 124298 | 124430 | 133 |
| Bro-e | cds | 125984 | 126057 | 74 |
| bm32 ac41 | gta | 30077 | 30151 | 75 |
| bm51 ac63 | gp37 | 46403 | 46478 | 76 |
| ph | orf1629 | 739 | 767 | 29 |
| egt | bm7a | 7928 | 7939 | 12 |
| bm10 ac18 | bm11 ac19 | 10458 | 10458 | 1 |
| iap-1 | lef-6 | 18485 | 18488 | 4 |
| fgf | hr2R | 23956 | 24011 | 56 |
| v-ubi | 39k | 25269 | 25320 | 52 |
| iap2 | bm58a ac72 | 56127 | 56184 | 58 |
| v-cath | gp64/67 | 99728 | 99843 | 116 |
| gp64/67 | p24 | 101437 | 101562 | 126 |
| pp34 | bm109 ac132 | 103508 | 103509 | 2 |
| p26 | p10 | 118767 | 118838 | 72 |
| p10 | p74 | 119124 | 119134 | 11 |
| p74 | me53 | 110734 | 110963 | 230 |
| ie-2 | pe38 | 121931 | 122415 | 485 |
| gta | bm34 ac43 | 31673 | 31685 | 13 |
| gp37 | dna pol | 47364 | 47492 | 129 |

[0053] The deletion of these spacers from the genome of a NPV alpha baculovirus clade Ia virus leads to a further reduction of the size of the genome in comparison to the native genome. Specifically, the deletion of these spacers from the genome of a AcMNPV virus leads to a further reduction of the size of the genome in comparison to the native genome of 2.24%. Accordingly, in an even more preferred embodiment the size of the genome of the AcMNPV virus of the invention is reduced by at least 29.48%.

[0054] The deletion of these spacers from the genome of a BmNPV virus leads to a further reduction of the size of the genome in comparison to the native genome of 2.33%. Accordingly, in an even more preferred embodiment the size of the genome of the BmNPV virus of the invention is reduced by at least 20.36%.

[0055] It is noted that some of the spacers indicated above overlap with the 5′UTRs indicated in Table 2a or 2b. Thus, if the 5′-UTR is deleted for a given gene and the spacer is deleted additionally this means that only that part of the spacer that is not overlapping with a 5′-UTR is deleted. Conversely, if a spacer is deleted that partially overlaps with a 5′-UTR the overlapping part is also deleted.

[0056] It is preferred that the NPV alpha baculovirus clade Ia genome from which above indicated CDS, 5′-UTRs, spacers and/or hr regions are deleted is based on the genome of a baculovirus selected from the group consisting of AcMNPV, PlxyNPV, RoMNPV, BmNPV, MaviMNPV, CfDefMNPV, AgMNPV, EppoNPV, AnpeNPV, CfMNPV, OpMNPV, and HycuNPV.

[0057] Exemplary genomes of these baculoviruses are accessible at the NIH and EBI databank. The phrase “based on the genome” means that the native genome of the respectively indicated baculovirus is used as a reference point and that the genome of the invention has that nucleotide sequence sans the CDS and/or 5′UTRs and preferably also spacers of the genes odv-e66, p43, odv-no42 or odv-e56, ptp, bro, ctx, orf603, polyhedrin, egt, bv/odv-e26, ac18, pif-2, env-prot, iap-1, sod, fgf, vubi, gp37, ac69, iap-2, pnk/pn1, ac91, odv-e28 pif-4, pif-3, pif-1, pk-2, chiA, v-cath, pp34, 94K, p26, p10, p74, ac145, and ac150 and/or hr regions.

[0058] To determine the extent of the deletion of the genome of the invention a reference genome is used, which is referred to as “native NPV-alpha baculovirus clade Ia genome”. This term is used to designate the genome of a naturally occurring NPV alpha baculovirus clade Ia virus and includes all silent mutations within open reading frames that do not impair functionality of the DNA elements. Preferably, this term comprises NPV-alphabaculovirus clade I a/b genomic sequences that exhibit at least 90% sequence identity to the nucleotide sequence of naturally occurring NPV alpha baculovirus clade Ia genome, e.g. those accessible at the NIH or EBI databank. It is preferred that the nucleotide sequence of the naturally occurring NPV alpha baculovirus clade Ia genome is for: (i) AcMNPV as set out in SEQ ID NO: 1 (NC_{—}001623) with a length of 133,894 base pairs, (ii) PlxyNPV as set out in SEQ ID NO: 2 (NC_{—}008349) with a length of 133,417 base pairs, (iii) RoMNPV as set out in SEQ ID NO: 3 (NC_{—}004323) with a length of 131,526 base pairs, (iv) BmNPV as set our in SEQ ID NO: 4 (NC_{—}001962) with a length of 128,413 base pairs, (v) MaviMNPV as set out in SEQ ID NO: 5 (NC_{—}008725.1) with a length of base pairs 111,953, (vi) CfDefMNPV as set out in SEQ ID NO: 6 (NC_{—}005137.2) with a length of 131,160 base pairs, (vii) AgMNPV as set out in SEQ ID NO: 7 (NC_{—}008520.1) with a length of 132,239 base pairs, (viii) EppoNPV as set out in SEQ ID NO: 8 (NC_{—}003083.1) with a length of 118,584 base pairs, (ix) AnpeNPV as set out in SEQ ID NO: 9 (NC_{—}008035.3) with a length of 126,629 base pairs, (x) CfMNPV as set out in SEQ ID NO: 10 (NC_{—}004778.3) with a length of 129,593 base pairs, (xi) OpMNPV as set out in SEQ ID NO: 11 (NC_{—}001875.2) with a length of 131,995 base pairs, and (xii) HycuNPV as set out in SEQ ID NO: 12 (NC_{—}007767.1) with a length of 132,959 base pairs. Accordingly, the reference native NPV-alpha baculovirus clade Ia genome preferably has at least 90% sequence identity to one of the sequences selected from the group consisting of SEQ ID NO: 1, 2, 3, 4, 5, 6, 7, 8, 9, 10, 11, or 12, more preferably at least 92% sequence identity to one of the sequences selected from the group consisting of SEQ ID NO: 1, 2, 3, 4, 5, 6, 7, 8, 9, 10, 11, or 12, more preferably at least 94% sequence identity to one of the sequences selected from the group consisting of SEQ ID NO: 1, 2, 3, 4, 5, 6, 7, 8, 9, 10, 11, or 12, more preferably at least 96% sequence identity to one of the sequences selected from the group consisting of SEQ ID NO: 1, 2, 3, 4, 5, 6, 7, 8, 9, 10, 11, or 12, even more preferably at least 98% sequence identity to one of the sequences selected from the group consisting of SEQ ID NO: 1, 2, 3, 4, 5, 6, 7, 8, 9, 10, 11, or 12 and most preferably 100% sequence identity to one of the sequences selected from the group consisting of SEQ ID NO: 1, 2, 3, 4, 5, 6, 7, 8, 9, 10, 11, or 12. The most preferred genome is that of AcMNPV according to SEQ ID NO: 1.

[0059] The present inventors have found that the CDS indicated in Table 4a and 4b can be deleted without detrimental effect on the respective NPV alpha baculovirus clade Ia virus (all CDS and proteins are with reference to AcMNPV). These CDS are considered to belong to a group that is referred to as Type IT. Accordingly, the deletion of these CDS (and preferably also the respective 5′-UTR, spacer and/or hr regions) are referred to as Type II deletions:

TABLE 4a
AcMNPV

| Name | UniProt | Definition | aa | bp | Start | Stop | Strand |
|---|---|---|---|---|---|---|---|
| ac11 | P41421 | AcOrf-11 peptide | 340 | 1023 | 7899 | 8921 | minus |
| ac30 | P41434 | Similarity to MSV tryptophan | 463 | 1392 | 24315 | 25706 | minus |
| | | repeat family peptide | | | | | |
| Gta | P41447 | global transactivator-like protein | 506 | 1521 | 34010 | 35530 | plus |
| ac63 | P41466 | AcOrf-63 peptide | 155 | 468 | 50795 | 51262 | plus |
| 15k | P41478 | p15 | 126 | 381 | 74356 | 74736 | plus |
| ac97 | P41657 | AcOrf-97 peptide | 56 | 171 | 84839 | 85009 | plus |
| ac121 | P41674 | AcOrf-121 peptide | 58 | 177 | 102647 | 102823 | plus |
| ac140 | P41699 | AcOrf-140 peptide | 60 | 183 | 122625 | 122807 | plus |
| ac146 | P41704 | AcOrf-146 peptide | 201 | 606 | 126527 | 127132 | minus |
| ac149 | P41706 | AcOrf-149 peptide | 107 | 324 | 130167 | 130490 | minus |

TABLE 4b
BmNPV

| Name | UniProt | Definition | aa | bp | Start | Stop | Strand |
|---|---|---|---|---|---|---|---|
| bm4 ac11 | 1488634 | AcMNPV | 340 | 1023 | 3248 | 4270 | minus |
| | | orf11 | | | | | |
| bm51 ac63 | 1488683 | AcMNPV | 155 | 468 | 45935 | 46402 | plus |
| | | orf63 | | | | | |
| 15K | 1488702 | P15 | 126 | 381 | 66329 | 66709 | plus |
| bm98a | 1488731 | AcMNPV | 67 | 174 | 94474 | 94647 | plus |
| ac121 | | orf121 | | | | | |
| bm122 | 1488754 | AcMNPV | 201 | 606 | 116323 | 116928 | minus |
| ac146 | | orf146 | | | | | |
| bm125 | 1488757 | AcMNPV | 106 | 321 | 119993 | 120313 | minus |
| ac149 | | orf149 | | | | | |

[0060] The total length of the CDS encoding these proteins is approximately 6,246 base pairs in AcMNPV according to SEQ ID NO: 1. Thus, the native AcMNPV genome may be shortened by deletion of one or more, preferably of all of the CDS encoding the proteins of Table 4a. If all these CDSs are deleted from the AcMNPV genome, the genome of the invention is preferably at least 6,246 base pairs shorter than the native AcMNPV genome. The respective shortening attributable to the deletion of one specific CDS can be derived from the column labelled “bp”. These CDS correspond to approximately 4.7% of the native genome of AcMNPV.

[0061] The native BmNPV genome may be shortened by deletion of one or more, preferably of all of the CDS encoding the proteins of Table 4b. If all these CDSs are deleted from the BmNPV genome, the genome of the invention is preferably at least 2,967 base pairs shorter than the native BmNPV genome. The respective shortening attributable to the deletion of one specific CDS can be derived from the column labelled “bp”. These CDS correspond to approximately 2.3% of the native genome of BmNPV.

[0062] It is more preferred that one or more of the 5′-UTRs of the CDS are also deleted. In AcMNPV the 5′-UTRs of these CDS have a length of 446 base pairs. In BmNPV the 5′-UTRs of these CDS have a length of 19 base pairs. The following Table 5a and 5b indicate the position of the 5′UTRs of the CDS deleted in preferred genomes of the invention. The 5′-UTR precedes the respectively indicated CDS Start codon by the indicated number of base pairs:

TABLE 5a
AcMNPV

| Name | GeneID | Start | Stop | Strand | Bp |
|---|---|---|---|---|---|
| ac11 | 1403843 | 7899 | 8921 | minus | 36 |
| ac30 | 1403862 | 24315 | 25706 | minus | 113 |
| gta | 1403874 | 34010 | 35530 | plus | 83 |
| ac63 | 1403896 | 50795 | 51262 | plus | 60 |
| 15K | 1403920 | 74356 | 74736 | plus | 140 |
| ac97 | 1403930 | 84839 | 85009 | plus | −29 |
| ac121 | 1403954 | 102647 | 102823 | plus | 11 |
| ac140 | 1403973 | 122625 | 122807 | plus | 70 |
| ac146 | 1403979 | 126527 | 127132 | minus | 17 |
| ac149 | 1403982 | 130167 | 130490 | minus | −35 |

TABLE 5b
BmNPV

| Name | GeneID | Start | Stop | Strand | Bp |
|---|---|---|---|---|---|
| bm4 ac11 | 1488634 | 3248 | 4270 | minus | 25 |
| bm51 ac63 | 1488683 | 45935 | 46402 | plus | 76 |
| 15K | 1488702 | 66329 | 66709 | plus | 4 |
| bm98a ac121 | 1488731 | 94474 | 94647 | plus | −108 |
| bm122 ac146 | 1488754 | 116323 | 116928 | minus | −6 |
| bm125 ac149 | 1488757 | 119993 | 120313 | minus | 28 |

[0063] The deletion of one or more of these 5′-UTRs from the genome of a NPV alpha baculovirus clade Ia virus leads to a further reduction of the size of the genome in comparison to the native genome. The deletion of one or more of these 5′-UTRs from the genome of a AcMNPV virus leads to a further reduction of the size of the genome in comparison to the native genome of up to 0.35%. The deletion of one or more of these 5′-UTRs from the genome of a BmNPV virus leads to a further reduction of the size of the genome in comparison to the native genome of up to 0.02%.

[0064] Alternatively or additionally the spacers of the AcMNPV CDS may be deleted, which amount to an additional deletion of 2,543 bp. In BmNPV the spacers of these CDS have a length of 3,028 base pairs. With reference to the nucleotide sequence of AcMNPV the spacers that may be deleted are the following:

TABLE 6a
AcMNPV

| Gene-Before | Gene-After | Start | Stop | Bp |
|---|---|---|---|---|
| Ac30 | sod | 25707 | 25819 | 113 |
| hr1a | Ac11 | 7865 | 7898 | 34 |
| Ac41 | GTA | 33927 | 34009 | 83 |
| GTA | Ac43 | 35531 | 35543 | 13 |
| lef9 | Ac63 | 50735 | 50794 | 60 |
| Ac63 | gp37 | 51263 | 51282 | 20 |
| Ac97 | 38K | 85010 | 85020 | 11 |
| hr4c | Ac121 | 102636 | 102646 | 11 |
| ME53 | Ac140 | 122555 | 122624 | 70 |
| Ac140 | IE-01 | 122808 | 122831 | 24 |
| Ac146 | IE-01 exon-2 | 127133 | 127149 | 17 |
| odv-e56 | Ac149 | 130139 | 130166 | 28 |

TABLE 6b
BmNPV

| Gene-After | Gene-before | Start | Stop | bp |
|---|---|---|---|---|
| pk-1 | bm4 ac11 | 3223 | 3247 | 25 |
| lef-9 | bm51 ac63 | 45875 | 45934 | 60 |
| hr3a | p15 | 65574 | 66328 | 755 |
| bm98 ac120 | hr4a | 94372 | 94425 | 54 |
| bm122 ap146 | ie-1 | 116929 | 116993 | 65 |
| odv-e56 | bm125 | 119965 | 119992 | 28 |
| | ac149 | | | |

[0065] The deletion of these spacers from the genome of a NPV alpha baculovirus clade Ia virus leads to a further reduction of the size of the genome in comparison to the native genome. Accordingly, in an even more preferred embodiment the size of the genome of the AcMNPV virus of the invention described above is reduced by up to a further 1.89%. In further preferred embodiments, the size of the genome of the BmNPV virus of the invention is reduced up to a further 2.36%

[0066] Accordingly, in a preferred embodiment the NPV alpha baculovirus clade Ia genome of the present invention comprises Type I deletions in addition to the type II deletions.

[0067] The AcMNPV genome of the invention is preferably at least 30.23% shorter than the native AcMNPV genome (if only Type I and II CDS are deleted), more preferably 35.16% shorter (if Type I and II CDS and 5′-UTRs are deleted) and more preferably 37.05% shorter (if Type I and II CDS, 5′-UTR and spacers are deleted).

[0068] The BmNPV genome of the invention is preferably at least 21.62% shorter than the native BmNPV genome (if only Type I and II CDS are deleted), more preferably 22.07% shorter (if Type I and II CDS and 5′-UTRs are deleted) and more preferably 24.38% shorter (if Type I and II CDS, 5′-UTR and spacers are deleted).

[0069] The present inventors have found that the CDS indicated in Table 7a and 7b can be deleted without detrimental effect on the respective NPV alpha baculovirus clade Ia virus (all CDS and proteins are with reference to AcMNPV). These CDS are considered to belong to a group that is referred to as Type II. Accordingly, the deletion of these CDS (and preferably also the respective 5′-UTR, spacer and/or hr regions) are referred to as Type III deletions:

TABLE 7a
AcMNPV

| Name | UniProt | Definition | aa | bp | Start | Stop | Strand |
|---|---|---|---|---|---|---|---|
| hispP | P21286 | putative | 182 | 549 | 27733 | 28281 | minus |
| | | histidinol- | | | | | |
| | | phosphalase | | | | | |
| ac44 | P41449 | AcOrf-44 | 131 | 396 | 35758 | 36153 | plus |
| | | peptide | | | | | |
| ac57 | P41461 | AcOrf-57 | 161 | 486 | 47073 | 47558 | plus |
| | | peptide | | | | | |
| ac84 | P41474 | AcOrf-84 | 188 | 567 | 71165 | 71731 | plus |
| | | peptide | | | | | |
| ac112/ | P41665 | AcOrf-112 | 87 | 264 | 96521 | 96784 | plus |
| 113 Nt | | peptide | | | | | |
| ac112/ | P41666 | AcOrf-113 | 169 | 510 | 96789 | 97298 | plus |
| 113 Ct | | peptide | | | | | |
| ac118 | P41671 | AcOrf-118 | 157 | 474 | 100231 | 100704 | minus |
| | | peptide | | | | | |
| ac122 | P41675 | AcOrf-122 | 62 | 189 | 102713 | 102901 | minus |
| | | peptide | | | | | |
| ie-01 | P11138 | putative | 636 | 1911 | 122832 | 128946 | plus |
| | | early gene | | | | | |
| | | transactivator | | | | | |
| ac152 | P41708 | AcOrf-152 | 92 | 279 | 132109 | 132387 | minus |
| | | peptide | | | | | |

TABLE 7b
BmNPV

| Name | UniProt | Definition | aa | bp | Start | Stop | Strand |
|---|---|---|---|---|---|---|---|
| bm35 ac44 | 1488666 | AcMNPV | 131 | 396 | 31903 | 32298 | plus |
| | | orf44 | | | | | |
| odv-e66 | 1488668 | ODV-E66 | 702 | 2109 | 32866 | 34974 | plus |
| bm46 ac57 | 1488678 | AcMNPV | 161 | 486 | 42221 | 42706 | plus |
| | | orf57 | | | | | |
| bm99 ac122 | 1488732 | AcMNPV | 61 | 186 | 94540 | 94725 | minus |
| | | orf122 | | | | | |

[0070] The total length of the CDS encoding these proteins is approximately 5,625 base pairs in AcMNPV according to SEQ ID NO: 1. Thus, the native AcMNPV genome may be shortened by deletion of one or more, preferably of all of the CDS encoding these proteins. If all these CDSs are deleted from the AcMNPV genome, the genome of the invention is preferably at least 5,625 base pairs shorter than the native AcMNPV genome. The respective shortening attributable to the deletion of one specific CDS can be derived from the column labelled “bp”. These CDS correspond to approximately 4.2% of the native genome of AcMNPV.

[0071] The total length of the CDS encoding these proteins is approximately 3,173 base pairs in BmNPV. Thus, the native BmNPV genome may be shortened by deletion of one or more, preferably of all of the CDS encoding these proteins. If all these CDSs are deleted from the BmNPV genome, the genome of the invention is preferably at least 3,173 base pairs shorter than the native BmNPV genome. The respective shortening attributable to the deletion of one specific CDS can be derived from the column labelled “bp”. These CDS correspond to approximately 2,47% of the native genome of BmNPV.

[0072] Accordingly, in a preferred embodiment the NPV alpha baculovirus clade Ia genome of the present invention comprises (i) Type II deletions, (ii) Type I deletions and Type III deletions, (iii) Type II and Type III deletions or (iv) Type I, II and III deletions.

[0073] The AcMNPV genome of the invention is preferably at least 25.66% shorter than the native AcMNPV genome (if only Type I CDS are deleted and Type II CDS, 5′-UTRs and spacers are retained), more preferably 27.24% shorter (if Type I CDS and 5′-UTRs are deleted and Type II CDS, 5′-UTRs and spacers are retained) and more preferably 34.14% shorter (if Type I and II CDS, 5′-UTR and spacers are deleted).

[0074] The BmNPV genome of the invention is preferably at least 18.3% shorter than the native BmNPV genome (if only Type I CDS are deleted and Type II CDS, 5′-UTRs and spacers are retained), more preferably 19.55% shorter (if Type I CDS and 5′-UTRs are deleted and Type IT CDS, 5′-UTRs and spacers are retained) and more preferably 24.20% shorter (if Type I and II CDS, 5′-UTR and spacers are deleted).

[0075] It is more preferred that the 5′-UTRs of these CDS are also deleted. In AcMNPV the 5′-UTRs of these CDS have a length of 351 base pairs. In BmNPV the 5′-UTRs of these CDS have a length of 7 base pairs. The following Tables 8a and 8b indicate the position of the 5′UTRs of the CDS deleted in preferred genomes of the invention. The 5′-UTR precedes the respectively indicated CDS Start codon by the indicated number of base pairs:

TABLE 8a
AcMNPV

| Name | GeneID | Start | Stop | Strand | Bp |
|---|---|---|---|---|---|
| hisP | 1403865 | 27733 | 28281 | minus | 12 |
| ac44 | 1403876 | 35758 | 36153 | plus | −20 |
| ac57 | 1403890 | 47073 | 47558 | plus | 184 |
| ac84 | 1403917 | 71165 | 71731 | plus | 31 |
| ac112/113 Nt | 1403945 | 96521 | 96784 | plus | 169 |
| ac112/113 Ct | 1403946 | 96789 | 97298 | plus | 4 |
| ac118 | 1403951 | 100231 | 100704 | minus | −6 |
| ac122 | 1403955 | 102713 | 102901 | minus | 62 |
| ie-01 | 1403988 | 122832 | 128946 | plus | 24 |
| ac152 | 1403985 | 132109 | 132387 | minus | 138 |

TABLE 8b
BmNPV

| Name | GeneID | Start | Stop | Strand | Bp |
|---|---|---|---|---|---|
| bm35 ac44 | 1488666 | 31903 | 32298 | plus | 1 |
| odv-e66 | 1488668 | 32866 | 34974 | plus | 98 |
| bm46 ac57 | 1488678 | 42221 | 42706 | plus | 16 |
| bm99 ac122 | 1488732 | 94540 | 94725 | minus | −108 |

[0076] The deletion of one or more of these 5′-UTRs from the genome of a AcMNPV leads to a further reduction of the size of the genome in comparison to the native genome of up to 0.26%.

[0077] The deletion of one or more of these 5′-UTRs from the genome of a BmNPV leads to a further reduction of the size of the genome in comparison to the native genome of up to 0.01%. Alternatively or additionally the spacers of the CDS in AcMNPV may be deleted, which amount to an additional deletion of 2183 bp. In BmNPV the spacers of these CDS have a length of 3021 base pairs. With reference to the nucleotide sequence of AcMNPV the spacers that may be deleted are the following:

TABLE 9a
AcMNPV

| Gene-After | Gene-Before | Start | Stop | Bp |
|---|---|---|---|---|
| fgt | HisP | 27587 | 27732 | 146 |
| HisP | Ac34 | 28282 | 28293 | 12 |
| Ac44 | Ac45 | 36154 | 36154 | 1 |
| Ac57 | Ac58 | 47559 | 47573 | 15 |
| hr3 | Ac84 | 71134 | 71164 | 31 |
| Ac112 | Ac113 | 96785 | 96788 | 4 |
| Ac117 | Ac118 | 100198 | 100230 | 33 |
| Ac122 | pk-2 | 102902 | 102963 | 62 |
| Ac140 | IE-01 | 122808 | 122831 | 24 |
| IE-2 | Ac152 | 132084 | 132108 | 25 |

TABLE 9b
BmNPV

| Gene-After | Gene-before | Start | Stop | bp |
|---|---|---|---|---|
| bm35 ac44 | bm36 ac45 | 32299 | 32299 | 1 |
| odv-e66 | ets | 34975 | 35072 | 98 |
| bm45 ac56 | bm46 ac57 | 41969 | 42220 | 252 |
| bm46 ac57 | bm47 ac58 | 42707 | 42722 | 16 |
| bm99 ac122 | gcn2 | 94726 | 94758 | 33 |

[0078] The deletion of these spacers from the genome of a AcMNPV virus leads to a further reduction of the size of the genome in comparison to the native genome of 1.63%. Accordingly, in an even more preferred embodiment the size of the genome of the AcMNPVvirus of the invention is reduced by up to a further 1.63%.

[0079] The deletion of these spacers from the genome of a BmNPV virus leads to a further reduction of the size of the genome in comparison to the native genome of 2.35%. Accordingly, in an even more preferred embodiment the size of the genome of the BmNPVvirus of the invention is reduced by up to a further 2.35%.

[0080] The present inventors have found that the CDS indicated in Table 10a and 10b can be deleted without detrimental effect on the respective NPV alpha baculovirus clade Ia virus (all CDS and proteins are with reference to AcMNPV). These CDS are considered to belong to a group that is referred to as Type IV. Accordingly, the deletion of these CDS (and preferably also the respective 5′-UTR, spacer and/or hr regions) are referred to as Type IV deletions:

TABLE 10a
AcMNPV

| Name | UniProt | Definition | aa | bp | Start | Stop | Strand |
|---|---|---|---|---|---|---|---|
| Pcna | P11038 | proliferating cell | 256 | 771 | 39643 | 40413 | minus |
| | | nuclear antigen | | | | | |
| ac56 | P41462 | AcOrf-56 peptide | 84 | 255 | 46634 | 46888 | plus |
| hcf-1 | P41470 | AcOrf-70 peptide; | 290 | 873 | 60110 | 60982 | plus |
| | | host cell factor-1 | | | | | |
| ac85 | P41475 | AcOrf-85 peptide | 53 | 162 | 71934 | 72095 | plus |
| cg30 | P16091 | hypothetical protein | 264 | 795 | 74737 | 75531 | minus |
| | | ACNVgp089 | | | | | |
| ac116 | P41669 | AcOrf-116 peptide | 56 | 171 | 99804 | 99974 | minus |
| ac117 | P41670 | AcOrf-117 peptide | 95 | 288 | 99910 | 100197 | Plus |

TABLE 10b
BmNPV

| Name | UniProt | Definition | aa | bp | Start | Stop | Strand |
|---|---|---|---|---|---|---|---|
| bm45 | 1488677 | AcMNPV orf56 | 84 | 255 | 41714 | 41968 | plus |
| ac56 | | | | | | | |
| cg30 | 1488703 | CG30 | 267 | 804 | 66714 | 67517 | minus |
| bm95a | 1488727 | AcMNPV orf116 | 56 | 171 | 92007 | 92177 | minus |
| ac116 | | | | | | | |
| bm96 | 1488728 | AcMNPV orf117 | 95 | 288 | 92113 | 92400 | plus |
| ac117 | | | | | | | |

[0081] The total length of the CDS encoding these proteins is approximately 3,027 base pairs in AcMNPV and approximately 1,230 base pairs in BmNPV. Thus, the native NPV alpha baculovirus clade Ia genome may be shortened by deletion of one or more, preferably of all of the CDS encoding these proteins.

[0082] If all these CDSs are deleted from the AcMNPV genome, the genome of the invention is preferably at least 3,027 base pairs shorter than the native AcMNPV genome. The respective shortening attributable to the deletion of one specific CDS can be derived from the column labelled “bp”. These CDS correspond to approximately 2.26% of the native genome of AcMNPV.

[0083] If all these CDSs are deleted from the BmNPV genome, the genome of the invention is preferably at least 823 base pairs shorter than the native BmNPV genome. The respective shortening attributable to the deletion of one specific CDS can be derived from the column labelled “bp”. These CDS correspond to approximately 0.64% of the native genome of BmMNPV.

[0084] It is more preferred that one or more of the 5′-UTRs of these CDS are also deleted. In AcMNPV the 5′-UTRs of these CDS have a length of 446 base pairs. In BmNPV the 5′-UTRs of these CDS have a length of 263 base pairs. The following Table 11a and 11b indicates the position of the 5′UTRs of the CDS deleted in the preferred AcMNPV and BmNPV genomes of the invention, respectively. The 5′-UTR precedes the respectively indicated CDS Start codon by the indicated number of base pairs:

TABLE 11a
AcMNPV

| Name | GeneID | Start | Stop | Strand | Bp |
|---|---|---|---|---|---|
| pcna | 1403881 | 39643 | 40413 | minus | 109 |
| ac56 | 1403889 | 46634 | 46888 | plus | 1 |
| hcf-1 | 1403903 | 60110 | 60982 | plus | 45 |
| ac85 | 1403918 | 71934 | 72095 | plus | 202 |
| cg30 | 1403921 | 74737 | 75531 | minus | 2 |
| ac116 | 1403949 | 99804 | 99974 | minus | −65 |

TABLE 11b
BmNPV

| Name | GeneID | Start | Stop | Strand | Bp |
|---|---|---|---|---|---|
| bm45 ac56 | 1488677 | 84 | 255 | 41714 | 252 |
| cg30 | 1488703 | 267 | 804 | 66714 | 4 |
| bm95a ac116 | 1488727 | 56 | 171 | 92007 | 7 |

[0085] The deletion of these 5′ UTRs from the genome of a AcMNPV virus leads to a further reduction of the size of the genome in comparison to the native genome of up to 0.25%.

[0086] The deletion of these 5′-UTRs from the genome of a BmNPV virus leads to a further reduction of the size of the genome in comparison to the native genome of up to 0.20%.

[0087] Alternatively or additionally the spacers of the CDS in AcMNPV may be deleted, which amount to an additional deletion of 1,847 bp. In BmNPV the spacers of these CDS have a length of 2,760 base pairs. With reference to the nucleotide sequence of AcMNPV the spacers that may be deleted are the following:

TABLE 12a
AcMNPV

| Gene-After | Gene-Before | Start | Stop | bp |
|---|---|---|---|---|
| Ac48 | Pcna | 39620 | 39642 | 23 |
| pcna | lef8 | 40414 | 40522 | 109 |
| Ac55 | Ac56 | 46633 | 46633 | 1 |
| Ac84 | Ac85 | 71732 | 71933 | 202 |
| Ac115 | Ac116 | 99797 | 99803 | 7 |

TABLE 12b
BmNPV

| Gene-After | Gene-before | Start | Stop | bp |
|---|---|---|---|---|
| bm45 ac56 | bm46 ac57 | 41969 | 42220 | 252 |
| p30 | vp39 | 67518 | 67519 | 2 |
| bm95 ac115 | bm95a ac116 | 92000 | 92006 | 7 |

[0088] The deletion of these spacers from the genome of a NPV alpha baculovirus clade Ia virus leads to a further reduction of the size of the genome in comparison to the native genome. Accordingly, in an even more preferred embodiment the size of the genome of the AcMNPV virus of the invention is reduced by up by a further 1.38%. In further preferred embodiments the size of the genome of the BmNPV virus is reduced 2.15%

[0089] In a preferred embodiment the NPV alpha baculovirus clade Ia genome, preferably the AcMNPV or the BmNPV genome, of the invention further lacks all 5′-UTR and/or 3′-UTR of the genes of (i) Type I, (ii) Type I and Type II, (iii) Type I and Type III, (iv) Type I and Type IV, (v) Type II and Type III, (vi) Type II and Type IV, (vii) Type II and Type IV, (viii) Type I, Type II and Type I, (ix) Type I, Type II and Type IV, (x) Type I, Type III and Type IV, (xi) Type II, Type I and Type IV, or (xii) Type I, Type II, Type III and Type IV.

[0090] In a preferred embodiment the NPV alpha baculovirus clade Ia genome, preferably the AcMNPV or the BmNPV genome, of the invention further lacks the spacers 5′ and/or 3′ of the genes of (i) Type I, (ii) Type I and Type II, (iii) Type I and Type m, (iv) Type I and Type IV, (v) Type II and Type I, (vi) Type II and Type IV, (vii) Type III and Type IV, (viii) Type I, Type II and Type II, (ix) Type I, Type II and Type IV, (x) Type I, Type III and Type IV, (xi) Type II, Type I and Type IV, or (xii) Type I, Type II, Type III and Type IV.

[0091] In a preferred embodiment the NPV alpha baculovirus clade Ia genome, preferably the AcMNPV or the BmNPV genome, of the invention further lacks one or more of the heterologous repeat (HR) sequences.

[0092] The preferred NPV alpha baculovirus clade Ia genomes, preferrably the AcMNPV or the BmNPV genome, lack the following heterologous repeat sequences:

[0093] (i) for AcMNPV one or more, preferably all of the heterologous repeat sequences corresponding to the regions spanning nucleotides 1 to 445, 7,747 to 7,864, 26,293 to 26,961, 48,679 to 48,708, 70,468 to 71,133, 93,456 to 93,605, 97,396 to 97,881, 102,606 to 102,635, 117,479 to 117,987 and 133,883 to 133,894 of the genome sequence according to SEQ ID NO: 1,

[0094] (ii) for PlxyNPV one or more, preferably all of the heterologous repeat sequences corresponding to the regions spanning nucleotides 1 to 441, 7,725 to 7,842, 27,391 to 28,255, 49,952 to 49,981, 50,439 to 51,255, 72,580 to 73,046, 94,061 to 94,210, 98,016 to 98,409, 103,134 to 103,163, 117,943 to 118,456, and 134,406 to 133,417 of the genome sequence according to SEQ ID NO: 2,

[0095] (iii) for RoMNPV one or more, preferably all of the heterologous repeat sequences corresponding to the regions spanning nucleotides 1 to 326, 6,454 to 6,491, 24,805 to 25,141, 46,826 to 46,855, 68,628 to 69,279, 91,594 to 91,623, 95,394 to 95,750, 100,470 to 100,499, 115,321 to 115,714, and 131,515 to 131,526 of the genome sequence according to SEQ ID NO: 3,

[0096] (iv) for BmNPV one or more, preferably all of the heterologous repeat sequences corresponding to the regions spanning nucleotides, 22,497 to 23,200, 24,012 to 24,278, 29,485 to 29566, 43821 to 43857, 64802 to 65350, 65499 to 65573, 86431 to 86648, 89552 to 90142, 94426 to 94483, 106947 to 107561 and 123706 to 124297 of the genome sequence according to SEQ ID NO: 4,

[0097] (v) for MaviMNPV one or more, preferably all of the heterologous repeat sequences corresponding to the regions spanning nucleotides 20436 to 21162, 56264 to 57313, 77148 to 77878, 92877 to 93652, and 109272 to 110071 of the genome sequence according to SEQ ID NO: 5,

[0098] (vi) for CfDefMNPV one or more, preferably all of the heterologous repeat sequences corresponding to the regions spanning nucleotides 6450-6723, 15714-16013, 22164 to 22959, 37020 to 37175, 65930 to 65959, 76886 to 77072, 86479 to 86720, 96698 to 96936, 100566 to 100716 and 105456 to 105485 of the genome sequence according to SEQ ID NO: 6, (vii) for AgMNPV one or more, preferably all of the heterologous repeat sequences corresponding to the regions spanning nucleotides 19648 to 19685, 52009 to 52064, 126402 to 126447, 126568 to 127008 and 128754 to 128960 of the genome sequence according to SEQ ID NO: 7,

[0099] (viii) for EppoNPV one or more, preferably all of the heterologous repeat sequences corresponding to the regions spanning nucleotides 3992 to 4094, 18956 to 19121, 88438 to 88950, 95415 to 95715, and 103275 to 103722 of the genome sequence according to SEQ ID NO: 8,

[0100] (ix) for AnpeNPV one or more, preferably all of the heterologous repeat sequences corresponding to the regions spanning nucleotides 18636 to 19241, 41040 to 41134, 48378 to 48521, 65768 to 65862, 65894 to 66019, 75128 to 75220, 78778 to 79048, 92649 to 92655, 110552 to 110905, 117548 to 117631, 120778 to 120838, 122220 to 122259 and 125492 to 125506 of the genome sequence according to SEQ ID NO: 9,

[0101] (x) for CfMNPV one or more, preferably all of the heterologous repeat sequences corresponding to the regions spanning nucleotides 6460 to 6723, 15714 to 16013, 22164 to 22959, 37020 to 37175, 65930 to 65959, 76886 to 77072, 86479 to 86720, 96698 to 96936, 100566 to 100716, 105456 to 105485, 113424 to 113779, 125448 to 125477 and 126985 to 127146 of the genome sequence according to SEQ ID NO: 10,

[0102] (xi) for OpMNPV one or more, preferably all of the heterologous repeat sequences corresponding to the regions spanning nucleotides 103528 to 103833, 127459 to 130270 and 141587 to 142185 of the genome sequence according to SEQ ID NO: 11, and

[0103] (xii) for HycuNPV one or more, preferably all of the heterologous repeat sequences corresponding to the regions spanning nucleotides 4710 to 5602, 18642 to 19810, 27465 to 28918, 35645 to 36379, 66095 to 66778, and 112869 to 113601 of the genome sequence according to SEQ ID NO: 12.

[0104] The relative reductions in genome size of the genomes of the invention that may be achieved in comparison to the native NPV-alpha baculovirus clade Ia genome are indicated in percent in Table 13a and 13b, i.e. the following table indicates preferred reduction in size that are achieved for the genomes of the present invention. The absolute reductions can be calculated for each of the NPV-alpha baculovirus clade Ia genome of the invention on the basis of the lengths of the respective elements indicated exemplary above for AcMNPV.

TABLE 13a
AcMNPV

| | Type I | Type I | Type II | Type II | Type III | Type III | Type IV | Type IV | | Total |
|---|---|---|---|---|---|---|---|---|---|---|
| No. | CDS | 5′-UTR | CDS | 5′-UTR | CDS | 5′-UTR | CDS | 5′-UTR | spacer | Reduction |
| 1 | 25.66 | | | | | | | | | 25.66 |
| 2 | 25.66 | 1.58 | | | | | | | | 27.24 |
| 3 | 25.66 | 1.58 | | | | | | | 2.24 | 29.48 |
| 4 | | | 4.66 | | | | | | | 4.66 |
| 5 | | | 4.66 | 0.35 | | | | | | 5.01 |
| 6 | | | 4.66 | 0.35 | | | | | 1.89 | 6.90 |
| 7 | | | | | 4.2 | | | | | 4.20 |
| 8 | | | | | 4.2 | 0.26 | | | | 4.46 |
| 9 | | | | | 4.2 | 0.26 | | | 1.98 | 6.44 |
| 10 | | | | | | | 2.26 | | | 2.26 |
| 11 | | | | | | | 2.26 | 0.25 | | 2.51 |
| 12 | | | | | | | 2.26 | 0.25 | 1.99 | 4.50 |
| 13 | 25.66 | | 4.66 | | | | | | | 30.32 |
| 14 | 25.66 | | 4.66 | 0.35 | | | | | | 30.67 |
| 15 | 25.66 | | 4.66 | 0.35 | | | | | 1.89 | 32.56 |
| 16 | 25.66 | | | | 4.2 | | | | | 29.86 |
| 17 | 25.66 | | | | 4.2 | 0.26 | | | | 30.12 |
| 18 | 25.66 | | | | 4.2 | 0.26 | | | 1.98 | 32.10 |
| 19 | 25.66 | | | | | | 2.26 | | | 27.92 |
| 20 | 25.66 | | | | | | 2.26 | 0.25 | | 28.17 |
| 21 | 25.66 | | | | | | 2.26 | 0.25 | 1.99 | 30.16 |
| 22 | 25.66 | 1.58 | 4.66 | | | | | | | 31.90 |
| 23 | 25.66 | 1.58 | 4.66 | 0.35 | | | | | | 32.25 |
| 24 | 25.66 | 1.58 | 4.66 | 0.35 | | | | | 1.89 | 34.14 |
| 25 | 25.66 | 1.58 | | | 4.2 | | | | | 31.44 |
| 26 | 25.66 | 1.58 | | | 4.2 | 0.26 | | | | 31.70 |
| 27 | 25.66 | 1.58 | | | 4.2 | 0.26 | | | 1.98 | 33.68 |
| 28 | 25.66 | 1.58 | | | | | 2.26 | | | 29.50 |
| 29 | 25.66 | 1.58 | | | | | 2.26 | 0.25 | | 29.75 |
| 30 | 25.66 | 1.58 | | | | | 2.26 | 0.25 | 1.99 | 31.74 |
| 31 | 25.66 | 1.58 | 4.66 | | | | | | | 31.90 |
| 32 | 25.66 | 1.58 | 4.66 | 0.35 | | | | | | 32.25 |
| 33 | 25.66 | 1.58 | 4.66 | 0.35 | | | | | 1.89 | 34.14 |
| 34 | 25.66 | 1.58 | | | 4.2 | | | | | 31.44 |
| 35 | 25.66 | 1.58 | | | 4.2 | 0.26 | | | | 31.70 |
| 36 | 25.66 | 1.58 | | | 4.2 | 0.26 | | | 1.98 | 33.68 |
| 37 | 25.66 | 1.58 | | | | | 2.26 | | | 29.50 |
| 38 | 25.66 | 1.58 | | | | | 2.26 | 0.25 | | 29.75 |
| 39 | 25.66 | 1.58 | | | | | 2.26 | 0.25 | 1.99 | 31.74 |
| 40 | 25.66 | 1.58 | 4.66 | | 4.2 | | | | | 36.10 |
| 41 | 25.66 | 1.58 | 4.66 | | 4.2 | 0.26 | | | | 36.36 |
| 42 | 25.66 | 1.58 | 4.66 | | 4.2 | 0.26 | | | 1.98 | 38.34 |
| 43 | 25.66 | 1.58 | 4.66 | | | | 2.26 | | | 34.16 |
| 44 | 25.66 | 1.58 | 4.66 | | | | 2.26 | 0.25 | | 34.41 |
| 45 | 25.66 | 1.58 | 4.66 | | | | 2.26 | 0.25 | 1.99 | 36.40 |
| 46 | 25.66 | 1.58 | 4.66 | 0.35 | 4.2 | | | | | 36.45 |
| 47 | 25.66 | 1.58 | 4.66 | 0.35 | 4.2 | 0.26 | | | | 36.71 |
| 48 | 25.66 | 1.58 | 4.66 | 0.35 | 4.2 | 0.26 | | | 1.63 | 38.34 |
| 49 | 25.66 | 1.58 | 4.66 | 0.35 | | | 2.26 | | | 34.51 |
| 50 | 25.66 | 1.58 | 4.66 | 0.35 | | | 2.26 | 0.25 | | 34.76 |
| 51 | 25.66 | 1.58 | 4.66 | 0.35 | | | 2.26 | 0.25 | 1.64 | 36.40 |
| 52 | 25.66 | 1.58 | 4.66 | 0.35 | 4.2 | | | | | 36.45 |
| 53 | 25.66 | 1.58 | 4.66 | 0.35 | 4.2 | 0.26 | | | | 36.71 |
| 54 | 25.66 | 1.58 | 4.66 | 0.35 | 4.2 | 0.26 | | | 1.63 | 38.34 |
| 55 | 25.66 | 1.58 | 4.66 | 0.35 | | | 2.26 | | | 34.51 |
| 56 | 25.66 | 1.58 | 4.66 | 0.35 | | | 2.26 | 0.25 | | 34.76 |
| 57 | 25.66 | 1.58 | 4.66 | 0.35 | | | 2.26 | 0.25 | 1.64 | 36.40 |
| 58 | 25.66 | 1.58 | 4.66 | 0.35 | 4.2 | | 2.26 | | | 38.71 |
| 59 | 25.66 | 1.58 | 4.66 | 0.35 | 4.2 | | 2.26 | 0.25 | | 38.96 |
| 60 | 25.66 | 1.58 | 4.66 | 0.35 | 4.2 | | 2.26 | 0.25 | 1.64 | 40.60 |
| 61 | 25.66 | 1.58 | 4.66 | 0.35 | 4.2 | 0.26 | 2.26 | | | 38.97 |
| 62 | 25.66 | 1.58 | 4.66 | 0.35 | 4.2 | 0.26 | 2.26 | 0.25 | | 39.22 |
| 63 | 25.66 | 1.58 | 4.66 | 0.35 | 4.2 | 0.26 | 2.26 | 0.25 | 1.38 | 40.60 |
| 64 | 25.66 | 1.58 | 4.66 | 0.35 | 4.2 | 0.26 | 2.26 | | | 38.97 |
| 65 | 25.66 | 1.58 | 4.66 | 0.35 | 4.2 | 0.26 | 2.26 | 0.25 | | 39.22 |
| 66 | 25.66 | 1.58 | 4.66 | 0.35 | 4.2 | 0.26 | 2.26 | 0.25 | 1.38 | 40.60 |
| 67 | 25.66 | 1.58 | | | 4.2 | | 2.26 | | | 33.70 |
| 68 | 25.66 | 1.58 | | | 4.2 | | 2.26 | 0.25 | | 33.95 |
| 68 | 25.66 | 1.58 | | | 4.2 | | 2.26 | 0.25 | 1.99 | 35.94 |
| 69 | 25.66 | 1.58 | | | 4.2 | 0.26 | 2.26 | | | 33.96 |
| 70 | 25.66 | 1.58 | | | 4.2 | 0.26 | 2.26 | 0.25 | | 34.21 |
| 71 | 25.66 | 1.58 | | | 4.2 | 0.26 | 2.26 | 0.25 | 1.73 | 35.94 |
| 72 | 25.66 | 1.58 | | | 4.2 | 0.26 | 2.26 | | | 33.96 |
| 73 | 25.66 | 1.58 | | | 4.2 | 0.26 | 2.26 | 0.25 | | 34.21 |
| 74 | 25.66 | 1.58 | | | 4.2 | 0.26 | 2.26 | 0.25 | 1.73 | 35.94 |

TABLE 13b
BmNPV

| | Type I | Type I | Type II | Type II | Type III | Type III | Type IV | Type IV | | Total |
|---|---|---|---|---|---|---|---|---|---|---|
| No. | CDS | 5′-UTR | CDS | 5′-UTR | CDS | 5′-UTR | CDS | 5′-UTR | spacer | Reduction |
| 1 | 18.3 | | | | | | | | | 18.30 |
| 2 | 18.3 | 1.25 | | | | | | | | 19.55 |
| 3 | 18.3 | 1.25 | | | | | | | 2.34 | 21.89 |
| 4 | | | 2.31 | | | | | | | 2.31 |
| 5 | | | 2.31 | 0.02 | | | | | | 2.33 |
| 6 | | | 2.31 | 0.02 | | | | | 2.32 | 4.65 |
| 7 | | | | | 2.47 | | | | | 2.47 |
| 8 | | | | | 2.47 | 0.01 | | | | 2.48 |
| 9 | | | | | 2.47 | 0.01 | | | | 2.48 |
| 10 | | | | | | | 0.64 | | | 0.64 |
| 11 | | | | | | | 0.64 | 0.2 | | 0.84 |
| 12 | | | | | | | 0.64 | 0.2 | 2.14 | 2.98 |
| 13 | 18.3 | | 2.31 | | | | | | | 20.61 |
| 14 | 18.3 | | 2.31 | 0.02 | | | | | | 20.63 |
| 15 | 18.3 | | 2.31 | 0.02 | | | | | 2.32 | 22.95 |
| 16 | 18.3 | | | | 2.47 | | | | | 20.77 |
| 17 | 18.3 | | | | 2.47 | 0.01 | | | | 20.78 |
| 18 | 18.3 | | | | 2.47 | 0.01 | | | 2.33 | 23.11 |
| 19 | 18.3 | | | | | | 0.64 | | | 18.94 |
| 20 | 18.3 | | | | | | 0.64 | 0.2 | | 19.14 |
| 21 | 18.3 | | | | | | 0.64 | 0.2 | 2.14 | 21.28 |
| 22 | 18.3 | 1.25 | 2.31 | | | | | | | 21.86 |
| 23 | 18.3 | 1.25 | 2.31 | 0.02 | | | | | | 21.88 |
| 24 | 18.3 | 1.25 | 2.31 | 0.02 | | | | | 2.32 | 24.20 |
| 25 | 18.3 | 1.25 | | | 2.47 | | | | | 22.02 |
| 26 | 18.3 | 1.25 | | | 2.47 | 0.01 | | | | 22.03 |
| 27 | 18.3 | 1.25 | | | 2.47 | 0.01 | | | 2.33 | 24.36 |
| 28 | 18.3 | 1.25 | | | | | 0.64 | | | 20.19 |
| 29 | 18.3 | 1.25 | | | | | 0.64 | 0.2 | | 20.39 |
| 30 | 18.3 | 1.25 | | | | | 0.64 | 0.2 | 2.14 | 22.53 |
| 31 | 18.3 | 1.25 | 2.31 | | | | | | | 21.86 |
| 32 | 18.3 | 1.25 | 2.31 | 0.02 | | | | | | 21.88 |
| 33 | 18.3 | 1.25 | 2.31 | 0.02 | | | | | 2.32 | 24.20 |
| 34 | 18.3 | 1.25 | | | 2.47 | | | | | 22.02 |
| 35 | 18.3 | 1.25 | | | 2.47 | 0.01 | | | | 22.03 |
| 36 | 18.3 | 1.25 | | | 2.47 | 0.01 | | | 2.33 | 24.36 |
| 37 | 18.3 | 1.25 | | | | | 0.64 | | | 20.19 |
| 38 | 18.3 | 1.25 | | | | | 0.64 | 0.2 | | 20.39 |
| 39 | 18.3 | 1.25 | | | | | 0.64 | 0.2 | 2.14 | 22.53 |
| 40 | 18.3 | 1.25 | 2.31 | | 2.47 | | | | | 24.33 |
| 41 | 18.3 | 1.25 | 2.31 | | 2.47 | 0.01 | | | | 24.34 |
| 42 | 18.3 | 1.25 | 2.31 | | 2.47 | 0.01 | | | 2.33 | 26.67 |
| 43 | 18.3 | 1.25 | 2.31 | | | | 0.64 | | | 22.50 |
| 44 | 18.3 | 1.25 | 2.31 | | | | 0.64 | 0.2 | | 22.70 |
| 45 | 18.3 | 1.25 | 2.31 | | | | 0.64 | 0.2 | 2.14 | 24.84 |
| 46 | 18.3 | 1.25 | 2.31 | 0.02 | 2.47 | | | | | 24.35 |
| 47 | 18.3 | 1.25 | 2.31 | 0.02 | 2.47 | 0.01 | | | | 24.36 |
| 48 | 18.3 | 1.25 | 2.31 | 0.02 | 2.47 | 0.01 | | | 2.31 | 26.67 |
| 49 | 18.3 | 1.25 | 2.31 | 0.02 | | | 0.64 | | | 22.52 |
| 50 | 18.3 | 1.25 | 2.31 | 0.02 | | | 0.64 | 0.2 | | 22.72 |
| 51 | 18.3 | 1.25 | 2.31 | 0.02 | | | 0.64 | 0.2 | 2.12 | 24.84 |
| 52 | 18.3 | 1.25 | 2.31 | 0.02 | 2.47 | | | | | 24.35 |
| 53 | 18.3 | 1.25 | 2.31 | 0.02 | 2.47 | 0.01 | | | | 24.36 |
| 54 | 18.3 | 1.25 | 2.31 | 0.02 | 2.47 | 0.01 | | | 2.31 | 26.67 |
| 55 | 18.3 | 1.25 | 2.31 | 0.02 | | | 0.64 | | | 22.52 |
| 56 | 18.3 | 1.25 | 2.31 | 0.02 | | | 0.64 | 0.2 | | 22.72 |
| 57 | 18.3 | 1.25 | 2.31 | 0.02 | | | 0.64 | 0.2 | 2.12 | 24.84 |
| 58 | 18.3 | 1.25 | 2.31 | 0.02 | 2.47 | | 0.64 | | | 24.99 |
| 59 | 18.3 | 1.25 | 2.31 | 0.02 | 2.47 | | 0.64 | 0.2 | | 25.19 |
| 60 | 18.3 | 1.25 | 2.31 | 0.02 | 2.47 | | 0.64 | 0.2 | 2.12 | 27.31 |
| 61 | 18.3 | 1.25 | 2.31 | 0.02 | 2.47 | 0.01 | 0.64 | | | 25.00 |
| 62 | 18.3 | 1.25 | 2.31 | 0.02 | 2.47 | 0.01 | 0.64 | 0.2 | | 25.20 |
| 63 | 18.3 | 1.25 | 2.31 | 0.02 | 2.47 | 0.01 | 0.64 | 0.2 | 2.11 | 27.31 |
| 64 | 18.3 | 1.25 | 2.31 | 0.02 | 2.47 | 0.01 | 0.64 | | | 25.00 |
| 65 | 18.3 | 1.25 | 2.31 | 0.02 | 2.47 | 0.01 | 0.64 | 0.2 | | 25.20 |
| 66 | 18.3 | 1.25 | 2.31 | 0.02 | 2.47 | 0.01 | 0.64 | 0.2 | 2.11 | 27.31 |
| 67 | 18.3 | 1.25 | | | 2.47 | | 0.64 | | | 22.66 |
| 68 | 18.3 | 1.25 | | | 2.47 | | 0.64 | 0.2 | | 22.86 |
| 68 | 18.3 | 1.25 | | | 2.47 | | 0.64 | 0.2 | 2.14 | 25.00 |
| 69 | 18.3 | 1.25 | | | 2.47 | 0.01 | 0.64 | | | 22.67 |
| 70 | 18.3 | 1.25 | | | 2.47 | 0.01 | 0.64 | 0.2 | | 22.87 |
| 71 | 18.3 | 1.25 | | | 2.47 | 0.01 | 0.64 | 0.2 | 2.13 | 25.00 |
| 72 | 18.3 | 1.25 | | | 2.47 | 0.01 | 0.64 | | | 22.67 |
| 73 | 18.3 | 1.25 | | | 2.47 | 0.01 | 0.64 | 0.2 | | 22.87 |
| 74 | 18.3 | 1.25 | | | 2.47 | 0.01 | 0.64 | 0.2 | 2.13 | 25.00 |

[0105] In each of the cases indicated above in Tables 13a and 13b one or more, preferably all of the hr regions are also deleted. For AcMNPV this leads to a further reduction in size of up to 3,115 base pairs (including overlaps with a CDS at positions 48,679 to 48,708) or up to 3,085 (excluding the overlap with the CDS), which equates to a size reduction of up to 2.33% and 2.30%, respectively. For BmNPV the size reduction of deleting one or more, preferably all of the hr regions leads to a deletion of up to 3,766 base pairs, which equates to a relative size reduction of up to 2.93%.

[0106] The present inventors have also discovered that certain genes of the NPV alpha baculovirus clade Ia genome are important to maintain vital functions of the virus. These genes are involved in various aspects, e.g. transcription, replication, assembly, packaging, and infectivity of the virus. It is preferred that these genes are left intact in the genomes of the invention.

[0107] Accordingly, in a preferred embodiment the AcMNPV genome of the invention comprises at least one of the genes encoding helicase, 38K, lef-5, 49K and odv-e18+28. Preferably, the genome of the invention comprises all of these genes. These genes are indicated in Table 14a with reference to the genome of AcMNPV and are designated as vital genes of category I:

TABLE 14a
AcMNPV

| Name | UniProt | Definition | aa | bp | Start | Stop | Strand |
|---|---|---|---|---|---|---|---|
| Helicase | P24307 | helicase | 1221 | 3666 | 80694 | 84359 | minus |
| 38K | P24745 | hypothetical protein | 320 | 963 | 85021 | 85983 | minus |
| | | ACNVgp099 | | | | | |
| lef-5 | P41658 | late expression factor 5 | 265 | 798 | 85918 | 86715 | Plus |
| 49K | P41700 | early 49 Daa protein | 477 | 1434 | 123632 | 125065 | Plus |
| odv-e18 + 28 | P41701 | occlusion-derived virus | 62 | 189 | 125153 | 125341 | Plus |
| | | envelope protein | | | | | |

[0108] Accordingly, in a preferred embodiment the BmNPV genome of the invention comprises at least one of the genes encoding helicase, 38K, lef-5, 49K and odv-e18+28. Preferably, the genome of the invention comprises all of these genes. These genes are indicated in Table 14b with reference to the genome of BmNPV and are designated as vital genes of category I:

TABLE 14b
BmNPV

| Name | UniProt | Definition | aa | bp | Start | Stop | Strand |
|---|---|---|---|---|---|---|---|
| helicase | 1724488 | DNA | 1222 | 3669 | 72477 | 76145 | minus |
| | | Helicase | | | | | |
| odv-e28 | 1488710 | orf96 | 182 | 549 | 76132 | 76680 | plus |
| 38k | 1488713 | 38K | 320 | 963 | 78661 | 79623 | minus |
| lef-5 | 1488714 | LEF-5 | 265 | 798 | 79558 | 80355 | plus |
| 49K | 1488750 | orf142 | 476 | 1431 | 113396 | 114826 | plus |
| odv-e18 | 1488751 | ODV-E18 | 101 | 306 | 114834 | 115139 | plus |

[0109] The helicase is required for replication, lef5 is required for transcription and 38K, 49K and odv-e18 are required for viral structure, packaging and assembly.

[0110] The present inventors have identified further genes that are important for viral function. Accordingly, in a preferred embodiment the NPV alpha baculovirus clade Ia genome of the invention comprises at least one of the genes encoding lcf-2, lef-1, p47, lef-8 vp1054, lef-9, dnapo1, ac66, vlf-1, gp41, ac81, p95, capsid, lef-4, p33, p18, odv-c25, p6.9, odv-eo43, alk-exo, and odv-ec27. Preferably, the genome of the invention comprises all of these genes. These genes are indicated in Table 15a with reference to the genome of AcMNPV and are designated as vital genes of category II:

TABLE 15
AcMNPV

| Name | UniProt | Definition | aa | bp | Start | Stop | Strand |
|---|---|---|---|---|---|---|---|
| lef-2 | P41418 | late expression factor 2 | 210 | 633 | 3089 | 3721 | Plus |
| lef-1 | P41417 | late expression factor 2 | 266 | 801 | 10513 | 11313 | Minus |
| p47 | P34051 | transcription regulator | 401 | 1206 | 32177 | 33382 | Minus |
| lef-8 | P41452 | late expression factor 8 | 876 | 2631 | 40523 | 43153 | Minus |
| vp1054 | P41458 | viral capsid associated protein | 365 | 1098 | 45222 | 46319 | Plus |
| lef-9, | P41465 | late expression factor 9 | 516 | 1551 | 49184 | 50734 | Plus |
| Dnapol | P18131 | DNA-dependant DNA- | 984 | 2955 | 52329 | 55283 | Minus |
| | | polymerase | | | | | |
| ac66 | P41467 | AcOrf-66 peptide | 808 | 2427 | 55292 | 57718 | Plus |
| vlf-1 | Q06687 | very late expression | 379 | 1140 | 63813 | 64952 | Minus |
| | | factor 1 | | | | | |
| gp41 | P32651 | occlusion-derived virus | 409 | 1230 | 65607 | 66836 | Minus |
| | | glycoprotein | | | | | |
| ac81 | Q06694 | AcOrf-81 peptide | 233 | 702 | 66826 | 67527 | Minus |
| p95 | Q06670 | viral capsid associated protein | 847 | 2544 | 67884 | 70427 | Plus |
| Capsid | P17499 | major viral capsid protein | 347 | 1044 | 75534 | 76577 | Minus |
| lef-4 | P41477 | late expression factor 4 | 464 | 1395 | 76596 | 77990 | Plus |
| p33 | P41480 | AcOrf-92 peptide | 259 | 780 | 78699 | 79478 | Minus |
| p18 | P41481 | AcOrf-93 peptide | 161 | 486 | 79477 | 79962 | Plus |
| odv-e25 | P41483 | occlusion-derived virus | 228 | 687 | 79971 | 80657 | Plus |
| | | envelope protein | | | | | |
| p6.9 | P06545 | basic protein | 55 | 168 | 86712 | 86879 | Minus |
| Odv-ec43 | P41662 | AcOrf-109 peptide | 390 | 1173 | 94721 | 95893 | Minus |
| alk-exo | P24731 | alkaline exonuclease | 419 | 1260 | 112560 | 113819 | Plus |
| Odv-ec27 | P41702 | occlusion-derived virus | 290 | 873 | 125357 | 126229 | Plus |
| | | envelope/capsid protein | | | | | |

[0111] Accordingly, in a preferred embodiment the BmNPV genome of the invention comprises at least one of the genes encoding lef-1, pif-2, p47, lef-8, vp1054, lef-9, dnapo1, bm56 ac68, vlf-1, gp41, bm67 ac81, p95, capsid, lef-4, p33, p6.9, odv-ec43, pif-3, pif-1, alk-exo, p74, odv-ec27, odv-c56, and lef-2. Preferably, the genome of the invention comprises all of these genes. These genes are indicated in Table 15b with reference to the genome of BmNPV and are designated as vital genes of category II:

TABLE 15b
BmNPV

| Name | UniProt | Definition | aa | bp | Start | Stop | Strand |
|---|---|---|---|---|---|---|---|
| lef-1 | O92381 | LEF-1 | 270 | 813 | 5480 | 6292 | Minus |
| pif-2 | O92389 | AcMNPV | 382 | 1149 | 12335 | 13483 | Plus |
| | | orf22 | | | | | |
| p47 | O92407 | P47 | 399 | 1200 | 28266 | 29465 | Minus |
| lef-8 | O92415 | LEF-8 | 877 | 2634 | 35594 | 38227 | Minus |
| vp1054 | O92420 | VP1054 | 365 | 1098 | 40300 | 41397 | Plus |
| lef-9 | O92427 | LEF-9 | 490 | 1473 | 44402 | 45874 | Plus |
| dnapol | P41712 | DNA | 986 | 2961 | 47493 | 50453 | Minus |
| | | Polymerase | | | | | |
| bm56 | O92432 | AcMNPV | 134 | 405 | 54058 | 54462 | Plus |
| ac68 | | orf68 | | | | | |
| vlf-1 | O92440 | VLF-1 | 379 | 1140 | 58190 | 59329 | Minus |
| gp41 | O92443 | GP41/P40 | 403 | 1212 | 59987 | 61198 | Minus |
| bm67 | O92444 | AcMNPV | 234 | 705 | 61188 | 61892 | Minus |
| ac81 | | orf81 | | | | | |
| p95 | O92446 | P95 | 839 | 2520 | 62249 | 64768 | Plus |
| capsid | O92449 | VP39 | 350 | 1053 | 67520 | 68572 | Minus |
| lef-4 | O92450 | LEF-4 | 465 | 1398 | 68591 | 69988 | Plus |
| p33 | O92452 | AcMNPV | 259 | 780 | 70485 | 71264 | Minus |
| | | orf92 | | | | | |
| p6.9 | P24649 | DNA | 65 | 198 | 80352 | 80549 | Minus |
| | | Binding | | | | | |
| odv- | O92468 | AcMNPV | 391 | 1176 | 87784 | 88959 | Minus |
| ec43 | | orf109 | | | | | |
| pif-3 | O92472 | AcMNPV | 204 | 615 | 91385 | 91999 | Minus |
| | | orf115 | | | | | |
| pif-1 | O92475 | AcMNPV | 527 | 1584 | 92532 | 94115 | Plus |
| | | orf119 | | | | | |
| alk-exo | O92487 | ALK-EXO | 420 | 1263 | 104200 | 105462 | Plus |
| p74 | O92491 | P74 | 645 | 1938 | 108796 | 110733 | Minus |
| odv- | O92496 | ODV-EC27 | 290 | 873 | 115154 | 116026 | Plus |
| ec27 | | | | | | | |
| odv-e56 | O92500 | ODV-E56 | 375 | 1128 | 118837 | 119964 | Minus |
| lef-2 | O55457 | LEF-2 | 210 | 633 | 127652 | 128284 | Plus |

[0112] Lef-2, lef-1 and dna1 are required for DNA replication, p47, lef-8, lef-9 and lef-4 are required for transcription, vp1054, vlf-1, gp41, p95, capsid, p33, p6.9, odv-o43 and alk-exo are required for viral packaging and assembly, ac66, ac81, and odv-ec27 are required for host interaction and odv-e25 required for viral structure (ODV envelope).

[0113] The present inventors have identified further genes that are important for viral function. Accordingly, in a preferred embodiment the NPV alpha baculovirus clade Ia genome of the invention comprises at least one of the genes encoding pk-1, 38.7K, dbp, lef-6, ac29, 39K, lef-11, ac38, ac53, fp, lef-3, ac75, ac76, ac78 tlp20, p40, p12, p48, ac106/107 Ni, ac106/107 Ct, ac110, me53 and ie-1. Preferably, the genome of the invention comprises all of these genes. These genes are indicated in Table 16a with reference to the genome of AcMNPV and are designated as vital genes of category III:

TABLE 16a
AcMNPV

| Name | UniProt | Definition | aa | bp | Start | Stop | Strand |
|---|---|---|---|---|---|---|---|
| pk-1 | P41415 | protein kinase | 272 | 819 | 6917 | 7735 | Plus |
| 38.7K | P41423 | AcOrf-13 peptide | 327 | 984 | 9638 | 10621 | Minus |
| Dbp | P41430 | ssDNA binding protein | 316 | 951 | 21183 | 22133 | Minus |
| lef-6 | P41432 | late expression factor 6 | 173 | 522 | 23465 | 23986 | Plus |
| ac29 | P41433 | AcOrf-29 peptide | 71 | 216 | 24046 | 24261 | Minus |
| 39K | P11042 | nuclear matrix associated | 275 | 828 | 29242 | 30069 | Minus |
| | | phosphoprotein | | | | | |
| lef-11 | P21288 | late expression factor 11 | 112 | 339 | 30063 | 30401 | Minus |
| ac38 | P21290 | AcOrf-38 peptide | 216 | 651 | 30364 | 31014 | Minus |
| ac53 | P41457 | AcOrf-53 peptide | 139 | 420 | 44712 | 45131 | Plus |
| Fp | P69037 | Fp protein | 214 | 645 | 48513 | 49157 | Minus |
| lef-3 | P41453 | late expression factor 3 | 385 | 1158 | 57721 | 58878 | Minus |
| ac75 | Q06699 | AcOrf-75 peptide | 133 | 402 | 63126 | 63527 | Minus |
| ac76 | Q06690 | AcOrf-76 peptide | 84 | 255 | 63543 | 63797 | Minus |
| ac78 | Q06693 | AcOrf-78 peptide | 109 | 330 | 64958 | 65287 | Minus |
| tlp20 | Q06691 | telokin-like protein-20 | 180 | 543 | 67376 | 67918 | Minus |
| p40 | P25695 | hypothetical protein | 361 | 1086 | 86921 | 88006 | Minus |
| | | ACNVgp102 | | | | | |
| p12 | P41482 | AcOrf-102 | 122 | 369 | 88026 | 88394 | Minus |
| p48 | Q00732 | hypothetical protein | 387 | 1164 | 88375 | 89538 | Minus |
| | | ACNVgp104 | | | | | |
| ac106/107 Nt | P41659 | AcOrf-106 peptide | 61 | 186 | 93873 | 94058 | Plus |
| ac106/107 Ct, | P41660 | AcOrf-107 peptide | 110 | 333 | 94059 | 94391 | Plus |
| ac110, | P41663 | AcOrf-110 peptide | 56 | 171 | 95929 | 96099 | Minus |
| me53 | Qo4719 | DNA synthesis | 449 | 1350 | 121205 | 122554 | Minus |
| | | regulator | | | | | |
| ie-1 | P11138 | early gene transactivator | 582 | 1749 | 127198 | 128946 | Plus |

[0114] Accordingly, in a preferred embodiment the NPV alpha baculovirus clade Ia genome of the invention comprises at least one of the genes encoding polyhedrin, pk-1, 38.7K ac13, env-prot, dbp, lef-6, bm20 ac29, v-ubi, 39k, lef-11, bm29 ac38, bm42 ac53, fp, bm54 ac66, lef-3, bm61 ac75, bm62 ac76, bm64 ac78, tlp20, p18, odv-e25, p40, p12, p45 Ac p48, bm90 ac106/107, bm92a ac110, me53, bm121 ac145, bm122 ac146 and io-1. Preferably, the genome of the invention comprises all of these genes. These genes are indicated in Table 16b with reference to the genome of BmNPV and are designated as vital genes of category III:

TABLE 16b
BmNPV

| Name | UniProt | Definition | aa | bp | Start | Stop | Strand |
|---|---|---|---|---|---|---|---|
| polyhedrin | 1724487 | Polyhedrin | 245 | 738 | 1 | 738 | Plus |
| pk-1 | 1724485 | Protein Kinase | 275 | 828 | 2395 | 3222 | Plus |
| 38.7K ac13 | 1488635 | AcMNPV orf13 | 331 | 996 | 4605 | 5600 | Minus |
| env-prot | 1488645 | AcMNPV orf23 | 673 | 2022 | 13586 | 15607 | Plus |
| dbp | 1488647 | DBP | 317 | 954 | 16186 | 17139 | Minus |
| lef-6 | 1488650 | LEF-6 | 173 | 522 | 18489 | 19010 | Plus |
| bm20 ac29 | 1488651 | AcMNPV orf29 | 71 | 216 | 19129 | 19344 | Minus |
| v-ubi | 1724483 | Ubiquitin | 77 | 234 | 25035 | 25268 | Plus |
| 39k | 1488658 | 39K | 277 | 834 | 25321 | 26154 | Minus |
| lef-11 | 1488659 | LEF-11 | 112 | 339 | 26148 | 26486 | Minus |
| bm29 ac38 | 1488660 | AcMNPV orf38 | 217 | 654 | 26449 | 27102 | Minus |
| bm42 ac53 | 1488673 | AcMNPV orf53 | 139 | 420 | 39790 | 40209 | Plus |
| fp | 1488681 | 25K | 214 | 645 | 43654 | 44298 | Minus |
| bm54 ac66 | 1488685 | AcMNPV orf66 | 805 | 2418 | 50462 | 52879 | Plus |
| lef-3 | 1488686 | LEF-3 | 385 | 1158 | 52882 | 54039 | Minus |
| bm61 ac75 | 1488693 | AcMNPV orf75 | 133 | 402 | 57497 | 57898 | Minus |
| bm62 ac76 | 1488694 | AcMNPV orf76 | 85 | 258 | 57917 | 58174 | Minus |
| bm64 ac78 | 1488696 | AcMNPV orf78 | 110 | 333 | 59335 | 59667 | Minus |
| tlp20 | 1488700 | AcMNPV orf82 | 181 | 546 | 61738 | 62283 | Minus |
| p18 | 1488708 | AcMNPV orf93 | 161 | 486 | 71263 | 71748 | Plus |
| odv-e25 | 1488709 | ODV-E25 | 228 | 687 | 71757 | 72443 | Plus |
| p40 | 1488715 | AcMNPV orf101 | 362 | 1089 | 80591 | 81679 | Minus |
| p12 | 1488716 | AcMNPV orf102 | 123 | 372 | 81699 | 82070 | Minus |
| p45 Ac p48 | 1488717 | AcMNPV orf103 | 387 | 1164 | 82051 | 83214 | Minus |
| bm90 ac106/107 | 1488720 | AcMNPV orf106 | 249 | 750 | 86702 | 87451 | Plus |
| bm92a ac110 | 1488723 | AcMNPV orf110 | 59 | 180 | 88983 | 89162 | Minus |
| me53 | 1488748 | ME53 | 451 | 1356 | 110964 | 112319 | Minus |
| bm121 ac145 | 1488753 | AcMNPV orf145 | 95 | 288 | 116041 | 116328 | Plus |
| bm122 ac146 | 1488754 | AcMNPV orf146 | 201 | 606 | 116323 | 116928 | Minus |
| ie-1 | 1488755 | IE-1 | 584 | 1755 | 116994 | 118748 | Plus |

[0115] Dbp, lef-11, ac38, lef-3, me53 and ic-1 are required for replication, 38.7K, lef-6 and 39K are required for transcription, fp, ac75, p40 required for virus structure, pk-1, ac53 and p12 are required for host interaction and ac29 ac76, ac78, tlp20, p48, ac106/107 Nt, ac106/107 Ct, and ac110 are of unknown function.

[0116] The present inventors have identified further genes that are important for viral function. Accordingly, in a preferred embodiment the NPV alpha baculovirus clade Ia genome of the invention comprises at least one of the genes encoding ac12, ac34, ac55, and ac108. Preferably, the genome of the invention comprises all of these genes. These genes are indicated in Table 17a with reference to the genome of AcMNPV and are designated as vital genes of category IV:

TABLE 17a
AcMNPV

| Name | UniProt | Definition | aa | bp | Start | Stop | Strand |
|---|---|---|---|---|---|---|---|
| ac12 | P41422 | AcOrf-12 peptide | 217 | 654 | 8958 | 9611 | Plus |
| ac34 | P21287 | AcOrf-34 peptide | 215 | 648 | 28294 | 28941 | Minus |
| ac55 | P41459 | AcOrf-55 peptide | 73 | 222 | 46411 | 46632 | Plus |
| ac108 | P41661 | AcOrf-108 peptide | 105 | 318 | 94392 | 94709 | Minus |

[0117] Accordingly, in a preferred embodiment the NPV alpha baculovirus clade Ia genome of the invention comprises at least one of the genes encoding egt, bm25 ac34, lef-10, bm44 ac55, chaB, bm48 ac60, vp80, bm91 ac108, p24, pp34 and ic-0. Preferably, the genome of the invention comprises all of these genes. These genes are indicated in Table 17b with reference to the genome of BmNPV and are designated as vital genes of category IV:

TABLE 17b
BmNPV

| Name | UniProt | Definition | aa | bp | Start | Stop | Strand |
|---|---|---|---|---|---|---|---|
| egt | 1488637 | UDP-Glucosyl Transferase | 506 | 1521 | 6407 | 7927 | Plus |
| bm25 ac34 | 1488657 | AcMNPV orf34 | 215 | 648 | 24367 | 25014 | Minus |
| lef-10 | 1488674 | LEF-10 | 78 | 237 | 40206 | 40442 | Plus |
| bm44 ac55 | 1488676 | AcMNPV orf55 | 77 | 234 | 41479 | 41712 | Plus |
| chaB | 1488679 | AcMNPV orf58 | 171 | 516 | 42723 | 43238 | Minus |
| bm48 ac60 | 1488680 | AcMNPV orf60 | 83 | 252 | 43250 | 43501 | Minus |
| vp80 | 1488718 | VP80 | 692 | 2079 | 83240 | 85318 | Plus |
| bm91 ac108 | 1488721 | AcMNPV orf108 | 105 | 318 | 87452 | 87769 | Minus |
| p24 | 1488737 | P24 | 195 | 588 | 101563 | 102150 | Plus |
| pp34 | 1488739 | PP34 | 315 | 948 | 102560 | 103507 | Plus |
| ie-0 | 1488749 | IE-0 | 261 | 786 | 112596 | 113381 | Plus |

[0118] These genes are of unknown function.

[0119] The present inventors have identified further genes that are important for viral function.

[0120] Accordingly, in a preferred embodiment the NPV alpha baculovirus clade Ia genome of the invention comprises at least one of the genes encoding ac4, ac5, orf1629, ac17+45, ac19, arif-1 Ct, arif-1 Nt, pkip, ac26, lcf-12, ao43, ac48, bjdp, ac72, ac73, ac74, ac79, ac111, ac114, ac120, ac124, lcf-7, gp67, gp16, ac132, ie-2, pe38. Preferably, the genome of the invention comprises all of these genes. These genes are indicated in Table 18a with reference to the genome of AcMNPV and are designated as vital genes of category V:

TABLE 18a
AcMNPV

| Name | UniProt | Definition | aa | bp | Start | Stop | Strand |
|---|---|---|---|---|---|---|---|
| ac4 | P25654 | AcOrf-4 peptide | 151 | 456 | 2295 | 2750 | Minus |
| ac5 | P41420 | AcOrf-5 peptide | 109 | 330 | 2779 | 3108 | Plus |
| orf1629 | Q03209 | viral capsid associated, protein | 543 | 1632 | 5287 | 6918 | Minus |
| ac17 + 45 | P12826 | AcOrf-17 peptide | 164 | 495 | 13738 | 14232 | Plus |
| ac19 | P41424 | AcOrf-19 peptide | 108 | 327 | 15461 | 15787 | Plus |
| arif-1 Ct | P41425 | actin rearrangement inducing | 69 | 210 | 16013 | 16222 | Minus |
| | | factor | | | | | |
| arif-1 Nt | P41426 | actin rearrangement | 319 | 960 | 16305 | 17264 | Minus |
| | | inducing-factor | | | | | |
| pkip | P41429 | protein kinase interacting | 169 | 510 | 20634 | 21143 | Minus |
| | | protein | | | | | |
| ac26 | P41431 | AcOrf-26 peptide | 129 | 390 | 22209 | 22598 | Plus |
| lef-12 | P41446 | AcOrf-41 peptide, late | 181 | 546 | 33381 | 33926 | Plus |
| | | expression factor 12 | | | | | |
| ac43 | P41448 | AcOrf-43 peptide | 77 | 234 | 35544 | 35777 | Plus |
| ac48 | P11039 | AcOrf-48 peptide | 113 | 342 | 39278 | 39619 | Minus |
| bjdp | P41455 | AcOrf-51 peptide | 318 | 957 | 43180 | 44136 | Plus |
| ac72 | P41471 | AcOrf-72 peptide | 60 | 183 | 61824 | 62006 | Plus |
| ac73 | P41472 | AcOrf-73 peptide | 99 | 300 | 62015 | 62314 | Minus |
| ac74 | P41473 | AcOrf-74 peptide | 265 | 798 | 62311 | 63108 | Minus |
| ac79 | Q06692 | AcOrf-79 peptide | 104 | 315 | 65290 | 65604 | Minus |
| ac111 | P41664 | AcOrf-111 peptide | 67 | 204 | 96148 | 96351 | Minus |
| ac114 | P41667 | AcOrr-114 peptide | 424 | 1275 | 97886 | 99160 | Minus |
| ac120 | P41673 | AcOrf-120 peptide | 82 | 249 | 102296 | 102544 | Plus |
| ac124 | P41679 | AcOrf-124 peptide | 247 | 744 | 103793 | 104536 | Plus |
| lef-7 | P41677 | late expression factor 7 | 226 | 681 | 104553 | 105233 | Minus |
| gp67 | P17501 | major budded virus | 512 | 1539 | 108179 | 109717 | Minus |
| | | envelope glycoprotein | | | | | |
| gp16 | P24729 | hypothetical protein | 106 | 321 | 110524 | 110844 | Plus |
| | | ACNVgp131 | | | | | |
| ac132 | P24730 | AcOrf-132 peptide | 219 | 660 | 111873 | 112532 | Plus |
| ie-2 | P24647 | early gene transactivator | 408 | 1227 | 130857 | 132083 | Minus |
| pe38 | P23801 | hypothetical protein | 321 | 966 | 132526 | 133491 | Plus |
| | | ACNVgp155 | | | | | |

[0121] The present inventors have identified further genes that are important for viral function. Accordingly, in a preferred embodiment the NPV alpha baculovirus clade Ia genome of the invention comprises at least one of the genes and, preferably, the genome of the invention comprises all of these genes orf1629, bm4 ac11, bv/odv-e26, bm9 ac17, bm10 ac18, bm11 ac19, arif-1, pkip, bm17 ac26, iap-1, bm21 ac30, lef-12, bm34 ac43, bjdp, gp37, iap-2, bm58a ac72, bm59 ac73, bm60 ac74, bm65 ac79, bm93 ac111, bm94 ac114, bm96, bm98 ac120, bm101 ac124, lef-7, gp64/67, p116, bm109 ac132, p26, p10, io-2, pe38, ptp, bm133 ac4 and bm134 ac5. These genes are indicated in Table 18b with reference to the genome of BmNPV and are designated as vital genes of category V:

TABLE 18b
BmNPV

| Name | UniProt | Definition | aa | bp | Start | Stop | Strand |
|---|---|---|---|---|---|---|---|
| orf1629 | 1488633 | Orf1629 | 542 | 1629 | 768 | 2396 | minus |
| bm4 ac11 | 1488634 | AcMNPV orf11 | 340 | 1023 | 3248 | 4270 | minus |
| bv/odv-e26 | 1488639 | BV/ODV-E26 | 229 | 690 | 8067 | 8756 | plus |
| bm9 ac17 | 1488640 | AcMNPV orf17 | 210 | 633 | 8725 | 9357 | plus |
| bm10 ac18 | 1488641 | AcMNPV orf18 | 356 | 1071 | 9387 | 10457 | minus |
| bm11 ac19 | 1488642 | AcMNPV orf19 | 110 | 333 | 10459 | 10791 | plus |
| arif-1 | 1488643 | ARIF-1 | 440 | 1323 | 10976 | 12298 | minus |
| pkip | 1488646 | PKIP | 169 | 510 | 15637 | 16146 | minus |
| bm17 ac26 | 1488648 | AcMNPV orf26 | 129 | 390 | 17215 | 17604 | plus |
| iap-1 | 1488649 | IAP1 | 292 | 879 | 17606 | 18484 | plus |
| bm21 ac30 | 1488652 | AcMNPV orf30 | 472 | 1419 | 19399 | 20817 | minus |
| lef-12 | 1488663 | AcMNPV orf41 | 183 | 552 | 29525 | 30076 | plus |
| bm34 ac43 | 1488665 | orf43-like protein | 78 | 237 | 31686 | 31922 | plus |
| bjdp | 1488671 | AcMNPV orf51 | 319 | 960 | 38254 | 39213 | plus |
| gp37 | 1488684 | GP37 | 294 | 885 | 46479 | 47363 | minus |
| iap-2 | 1488689 | IAP2 | 249 | 750 | 55377 | 56126 | plus |
| bm58a ac72 | 1488690 | AcMNPV orf72 | 60 | 183 | 56185 | 56367 | plus |
| bm59 ac73 | 1488691 | AcMNPV orf73 | 99 | 300 | 56377 | 56676 | minus |
| bm60 ac74 | 1488692 | AcMNPV orf74 | 268 | 807 | 56673 | 57479 | minus |
| bm65 ac79 | 1488697 | AcMNPV orf79 | 104 | 315 | 59670 | 59984 | minus |
| bm93 ac111 | 1488724 | AcMNPV orf111 | 67 | 204 | 89211 | 89414 | minus |
| bm94 ac114 | 1488725 | AcMNPV orf114 | 424 | 1275 | 90089 | 91363 | minus |
| bm98 ac120 | 1488730 | AcMNPV orf120 | 82 | 249 | 94123 | 94371 | plus |
| bm101 ac124 | 1488734 | AcMNPV orf124 | 244 | 735 | 95620 | 96354 | plus |
| lef-7 | 1488735 | LEF-7 | 227 | 684 | 96376 | 97059 | minus |
| gp64/67 | 1488736 | GP64/67 | 530 | 1593 | 99844 | 101436 | minus |
| gp16 | 1488738 | GP16 | 106 | 321 | 102178 | 102498 | plus |
| bm109 ac132 | 1488740 | AcMNPV orf132 | 220 | 663 | 103510 | 104172 | plus |
| p26 | 1488745 | P26 | 240 | 723 | 107702 | 108424 | plus |
| p10 | 1488746 | P10 | 70 | 213 | 108497 | 108709 | plus |
| ie-2 | 1488759 | IE-2 | 422 | 1269 | 120662 | 121930 | minus |
| pe38 | 1488760 | PE38 | 309 | 930 | 122416 | 123345 | plus |
| ptp | 1488762 | PTP | 168 | 507 | 124431 | 124937 | plus |
| bm133 ac4 | 1488765 | AcMNPV orf4 | 151 | 456 | 126858 | 127313 | minus |
| bm134 ac5 | 1488766 | orf5-like protein | 109 | 330 | 127342 | 127671 | plus |

[0122] Ac79 and lef-7 are required for replication, lef-12 and bjdp are required for transcription, orf1629 is required for virus structure ao4, arif-1 Ct/Nt, pkip, gp67, ie-2 and pe38 are required for host interaction and ac5, ac17+45, ac19, ac26, ac43, ac48, ac72, ac73, ac74, ac111, ac114, ac120, ac124, gp16, and ac132 are of unknown.

[0123] The present inventors have identified further genes that are important for viral function. Accordingly, in a preferred embodiment the NPV alpha baculovirus clade Ia genome of the invention comprises at least one of the genes encoding ac45, ao47, ac52+71, he65, 35K and ac154. Preferably, the genome of the invention comprises all of these genes. These genes are indicated in Table 19a with reference to the genome of AcMNPV and are designated as vital genes of category VI:

TABLE 19a
AcMNPV

| Name | UniProt | Definition | aa | bp | Start | Stop | Strand |
|---|---|---|---|---|---|---|---|
| ac45 | P41450 | AcOrf-45 peptide | 192 | 579 | 36155 | 36733 | Plus |
| ac47 | P11040 | AcOrf-47 peptide | 88 | 267 | 38938 | 39204 | Minus |
| ac52 +71 | P41456 | AcOrf-52 peptide | 123 | 372 | 44339 | 44710 | Minus |
| he65 | Q08539 | hypothetical protein ACNVgp106 | 553 | 1662 | 91667 | 93328 | Minus |
| 35K | P08160 | annihilator | 299 | 900 | 116492 | 117391 | Plus |
| ac154 | P41709 | AcOrf-154 peptide | 81 | 246 | 133591 | 133836 | Plus |

[0124] These genes are indicated in Table 19b with reference to the genome of BmNPV and are designated as vital genes of category VI:

TABLE 19b
BmNPV

| Name | UniProt | Definition | aa | bp | Start | Stop | Strand |
|---|---|---|---|---|---|---|---|
| orf1629 | 1488633 | Orf1629 | 542 | 1629 | 768 | 2396 | minus |
| bm4 ac11 | 1488634 | AcMNPV orf11 | 340 | 1023 | 3248 | 4270 | minus |
| bm9 ac17 | 1488640 | AcMNPV orf17 | 210 | 633 | 8725 | 9357 | plus |
| bm10 ac18 | 1488641 | AcMNPV orf18 | 356 | 1071 | 9387 | 10457 | minus |
| bm11 ac19 | 1488642 | AcMNPV orf19 | 110 | 333 | 10459 | 10791 | plus |
| arif-1 | 1488643 | ARIF-1 | 440 | 1323 | 10976 | 12298 | minus |
| pkip | 1488646 | PKIP | 169 | 510 | 15637 | 16146 | minus |
| bm17 ac26 | 1488648 | AcMNPV orf26 | 129 | 390 | 17215 | 17604 | plus |
| iap-1 | 1488649 | IAP1 | 292 | 879 | 17606 | 18484 | plus |
| sod | 1488655 | SOD | 151 | 456 | 22029 | 22484 | plus |
| p43 | 1488661 | P43 | 362 | 1089 | 27170 | 28258 | minus |
| lef-12 | 1488663 | AcMNPV orf41 | 183 | 552 | 29525 | 30076 | plus |
| bm34 ac43 | 1488665 | orf43-like protein | 78 | 237 | 31686 | 31922 | plus |
| bm35 ac44 | 1488666 | AcMNPV orf44 | 131 | 396 | 31903 | 32298 | plus |
| bm36 ac45 | 1488667 | AcMNPV orf45 | 193 | 582 | 32300 | 32881 | plus |
| ets ac47 | 1488669 | ETS | 89 | 270 | 35073 | 35342 | minus |
| bjdp | 1488671 | AcMNPV orf51 | 319 | 960 | 38254 | 39213 | plus |
| bm41 ac52 | 1488672 | AcMNPV orf52 | 194 | 585 | 39204 | 39788 | minus |
| bm45 ac56 | 1488677 | AcMNPV orf56 | 84 | 255 | 41714 | 41968 | plus |
| bm51 ac63 | 1488683 | AcMNPV orf63 | 155 | 468 | 45935 | 46402 | plus |
| gp37 | 1488684 | GP37 | 294 | 885 | 46479 | 47363 | minus |
| bm57 ac69 | 1488688 | AcMNPV orf69 | 262 | 789 | 54440 | 55228 | plus |
| iap-2 | 1488689 | IAP2 | 249 | 750 | 55377 | 56126 | plus |
| bm60 ac74 | 1488692 | AcMNPV orf74 | 268 | 807 | 56673 | 57479 | minus |
| bm65 ac79 | 1488697 | AcMNPV orf79 | 104 | 315 | 59670 | 59984 | minus |
| he65 | 1488719 | HE65 | 289 | 870 | 85343 | 86212 | minus |
| bm93 ac111 | 1488724 | AcMNPV orf111 | 67 | 204 | 89211 | 89414 | minus |
| bm98 ac120 | 1488730 | AcMNPV orf120 | 82 | 249 | 94123 | 94371 | plus |
| lef-7 | 1488735 | LEF-7 | 227 | 684 | 96376 | 97059 | minus |
| chi-a | 1724489 | CHITINASE | 552 | 1659 | 97049 | 98707 | minus |
| v-cath | 1724490 | Cystein Protease | 323 | 972 | 98756 | 99727 | plus |
| gp16 | 1488738 | GP16 | 106 | 321 | 102178 | 102498 | plus |
| p35 | 1488744 | P35 | 299 | 900 | 105923 | 106822 | plus |
| p26 | 1488745 | P26 | 240 | 723 | 107702 | 108424 | plus |
| p10 | 1488746 | P10 | 70 | 213 | 108497 | 108709 | plus |
| bm125 ac149 | 1488757 | AcMNPV orf149 | 106 | 321 | 119993 | 120313 | minus |
| bm126 ac150 | 1488758 | AcMNPV orf150 | 115 | 348 | 120282 | 120629 | plus |
| pe38 | 1488760 | PE38 | 309 | 930 | 122416 | 123345 | plus |
| bm129 ac154 | 1488761 | AcMNPV orf154 | 77 | 234 | 123446 | 123679 | plus |
| bm133 ac4 | 1488765 | AcMNPV orf4 | 151 | 456 | 126858 | 127313 | minus |

[0125] ac52+71 and he65 appear required for replication, 35K appears required for host interaction and ac45, ao47, and he65 are of unknown function.

[0126] It is preferred that the genome of the present invention comprises one or all, preferably all of the following genes: (i) vital genes of category I; (ii) vital genes of category II; (iii) vital genes of category III; (iv) vital genes of category IV; (v) vital genes of category V: (vi) vital genes of category VI; (vii) vital genes of category I and II; (viii) vital genes of category I and III; (ix) vital genes of category I and IV; (x) vital genes of category I and V; (xi) vital genes of category I and VI; (xii) vital genes of category I, II and m; (xiii) vital genes of category I, II and IV; (xiv) vital genes of category I, II and V; (xv) vital genes of category I, II and VI; (xvi) vital genes of category I, III and IV; (xvii) vital genes of category I, III and V; (xviii) vital genes of category I, III and VI; (xix) vital genes of category I, IV and V; (xx) vital genes of category I, IV and VI; (xxi) vital genes of category I, V and VI; (xxii) vital genes of category I, II, II and IV; (xxiii) vital genes of category I, II, III and V; (xxiv) vital genes of category I, II, III and VI; (xxv) vital genes of category I, II, IV and V; (xxvi) vital genes of category I, II, IV and VI; (xvii) vital genes of category I, II, V and VI; (xxix) vital genes of category I, II, III, IV and V; (xxx) vital genes of category I, II, III, IV and VI; (xxxi) vital genes of category I, III, IV, V and VI; (xxxii) vital genes of category I, II, IV, V and VI; (xxxii) vital genes of category I, II, III, V and VI; (xxxiii) vital genes of category I, II, III, IV, V and VI.

[0127] In each of above cases it is preferred that the genome comprises both the CDS as well as any 5′-UTR and/or 3′-UTR flanking the CDS.

[0128] The present inventors also found that the following CDSs of the hr4-5 section (bp 99182-121072) can be deleted completely without detrimental effect on AcMNPV: p26, p10, p74, pif-3, ac116, ac117, ac118, ac121, ac122, pk-2, v-cath, pp34 and/or 94K. Also, the CDSs of the genes pif-1 and chiA of the hr4-5 section can be deleted partially (truncated) without detrimental effect on AcMNPV. This is because these genes are not essential for virus infection and propagation, but since the promoter regions of adjacent genes overlap with their CDSs, a portion of pif-1 and chiA has to remain. For pif-1, the portion that may be deleted is bp 100699 to bp102199 of the AcMNPV genome (pif-1 itself extends from bp 100699 to bp 102291 of the AcMNPV genome), and for chiA, this portion is bp 105560 to bp 106937 of the AcMNPV genome (chiA itself extends from bp 105282 to bp 106937 of the AcMNPV genome). In other words, the portion that must remain of pif-1 in the genome is bp 102200 to bp 102291 of the AcMNPV genome and the portion that must remain of chiA in the genome is bp 105282 to bp 105559 of the AcMNPV genome. Accordingly, pif-1 and chiA are partially deleted such that the promoter regions of the adjacent genes remain. This applies to all embodiments mentioned herein, which relate to pif-1 and/or chiA. In a further general embodiment, genes taught to be deletable herein may be deleted only in as far as portions of the sequence remain which are part of the CDS or the 5′/3′ UTR of a gene taught to be essential.

[0129] Thus, in a further embodiment, the NPV alpha baculovirus clade Ia genome according to the first aspect of the invention lacks at least one, two, three, four, five, six, seven, eight, nine, ten, eleven, twelve, thirteen or fourteen genes, preferably all genes of the group consisting of pif-1, p26, p10, p74, pif-3, ac116, ac117, ac118, ac121, ac122, pk-2, chiA, v-cath, pp34 and 94K, wherein pif-1 and chiA are partially deleted such that the promoter regions of the adjacent genes remain. The adjacent genes are ac120 for pif-1 and lef-7 for chiA and the promoter region of these genes that overlap with pif-1 and chiA, respectively, are defined above. Preferably, said genome also lacks (i) the 5′-L TR and/or 3′-UTR (as defined above) and/or (ii) the spacers 5′ and/or 3′ (as defined above) of at least one, two, three, four, five, six, seven, eight, nine, ten, eleven, twelve, thirteen, fourteen or preferably all of these genes The present inventors also found that the following CDSs of the hr4-5 section (bp 99182-121072) are important to maintain vital functions of AcMNPV: ac120, ac124, lef-7, gp64/67, p24, gp16, ac132, alk-exo, and 35K. Thus, in a further embodiment, the NPV alpha baculovirus clade Ia genome according to the first aspect of the invention comprises at least one, two, three, four, five, six, seven, eight preferably all genes of the group consisting of ac120, ac124, lef-7, gp64/67, p24, gp16, ac132, alk-exo, and 35K. Preferably, said genome comprises also (i) the 5′-UTR and/or 3′-UTR (as defined above) and/or (ii) the spacers 5′ and/or 3′ (as defined above) of at least one, two, three, four, five, six, seven, eight, or preferably all of these genes.

[0130] Thus, in a preferred embodiment, the NPV alpha baculovirus clade Ia genome according to the first aspect of the invention (a) lacks at least one, two, three, four, five, six, seven, eight, nine, ten, eleven, twelve, thirteen or fourteen genes, preferably all genes of the group consisting of pif-1, p26, p10, p74, pif-3, ac116, ac1117, ac118, ac121, ac122, pk-2, chiA, v-cath, pp34 and 94K, wherein pif-1 and chiA are only partially deleted such that the promoter regions of the adjacent genes remain; and (b) comprises at least one, two, three, four, five, six, seven, eight or preferably all genes of the group consisting of ac120, ac124, lcf-7, gp64/67, p24, gp16, ac132, alk-exo, and 35K. Preferably, said genome lacks/comprises also (i) the 5′-UTR and/or 3′-UTR and/or (ii) the spacers 5′ and/or 3′ of at least 1, 2, 3, 4, 5, 6, 7, 8, 9, 10, 11, 12, 13, 14, 15, 16, 16, 17, 19, 20, 21, 22, 23 or preferably all of these genes.

[0131] In a second aspect the present invention provides a NPV alpha baculovirus clade Ia genome according to the first aspect of the invention further comprising a nucleotide sequence heterologous to the NPV alpha baculovirus clade Ia genome. The term “heterologous” in this context refers to nucleotide sequence not natively occurring in the genome of the respective NPV alpha baculovirus clade Ia genome or not occurring at that position. Accordingly, a native promoter of that baculovirus that is rearranged within the genome is also considered heterologous. Preferably, the term refers to nucleotide sequence not natively comprised in a baculovirus, more preferably a eukaryotic gene or cDNA. Particularly, preferred the gene or cDNA is of mammalian, e.g. mouse, rat, rabbit, dog, cat, human origin. It is particularly preferred that the heterologous nucleotide sequence comprises more than one gene. Due to the large size reduction the genome of the present invention can accommodate large sections of heterologous nucleotide sequences. The inserts can be as big as the native sequence removed. Accordingly, Table 9 can serve as an indication of the size of the heterologous nucleotide sequence that can be present in the genome of the invention. The expression of the genes comprised in the heterologous nucleotide sequence is preferably driven by IE1 or polyhedrin or p10 promoter.

[0132] Other preferred heterologous nucleotide sequence that may be comprised in the genome are a Tn7 site, a nucleotide sequence encoding a resistance gene, a Homing endonuclease site, a mutated fp gene, loxP sites, IE1/polyhedrin/p10 promoter, a nucleotide sequence encoding a fluorescent protein. Preferred fluorescent proteins comprise green, red or yellow fluorescent proteins or mCherry.

[0133] In a third aspect the present invention provides an infectious NPV alpha baculovirus clade Ia virus comprising a genome according to the first or the second aspect of the invention.

[0134] Using improved methodology reported by Smith and colleagues (Smith H O et al PNAS 2003) on accurate assembly of ˜10 Kb DNA segments, we aim to assemble our computationally identified assembled gene segments from synthetic long polynucleotide fragments using molecular biology techniques for DNA assembly (Stemmer W P C et al., Gene 1995, Gibson et al., Nature Methods 2009). PCR amplification would then be used to obtain large amounts of pure full-length genomes (15-Kb DNA segments) and finally, gel electrophoresis will be used to purify amplified gene segments. Having engineered and amplified the gene segment of interest, the wild-type sequence with this synthetic DNA fragment could be replaced in the current “wild-type” baculoviral genome (which itself has been already engineered by classical means). In principle, the synthetic gene segment could be inserted into baculoviruses using E. coli/yeast based recombination and in-vitro ligation (Zhao Y. et al., Nucleic Acids Res 2003). As reported by Gibson and colleagues on synthetic genome assembly strategy in yeast (Gibson D G et al., Science 2010), three stage of genome assembly using transformation and homologues recombination in yeast. As a first stage, 10 kb synthetic gene segments and vector would be recombined in yeast/E. coli and transferred to E. coli. Then, the vector with assembled segments will be isolated for positive selection. At the second and third stage, the multiple 10 kb fragments and wild-type genome fragments would be transformed in the yeast/E. coli which would produce larger second-stage and final stage assembly intermediate. Here in order to generate semi-synthetic genome assembly, yeast/E. coli would be co-transformed with the baculovirus wild-type gene fragments and PCR amplified vector with overlapping ends of the synthetic inserts.

[0135] Once the hybrid genome is constructed and isolated from the yeast, it will be characterized by screening with multiplex PCR. Further for comparison, natural genome extracted from the yeast/E. coli and baculovirus (wild-type) would be used for characterization analysis. Once characterized, semi-synthetic genome transplantation strategy will be used wherein semi-synthetic genome from yeast clones would be transplanted into recipient cells as described before (Benders G A et al, Nucleic acids Res. 2010). Further the functionality of the hybrid virus with the synthetic gene segment would be validated based on its self-replicating properties and also by expressing test proteins and complexes.

[0136] In a fourth aspect the present invention provides a cell infected with a virus according to the third aspect of the present invention. A large number of suitable cells are publically available (see, e.g. Lynn, D. E. (2007) Methods in Molecular Biology. Vol 338, Chapter 6 Baculovirus and Insect Cell Expression Protocols, Editor: Murhammer D. W., Humanan Press Inc.). Preferably, the cell is selected from the group consisting of Ao/I, Hi5, Sf9, Sf21, Ao38, Drosophila $2, T.ni, FTRS-AoL1/-AoL2/-AfL, BCIRL/AMCY-AiOV-CLG, BCIRL/AMCY-AiTS-CLG, HCRL-ATO10/ATO20, BCIRL/AMCY-AfOV-CLG, BCIRL/AMCY-AfTS-CLG, RML-2, NISES-AnPe-426, NISES-Anya-0611, BCIRL/AMCY-AgE-CLG-1/2/3, UFL-AG-286, FTRS-AbL81, SES-Bma-O1A/R, Bm-N/-5/-21E-HNU5, NIV-BM-1296/-197, SES-Bm-130A/30R/e21A/c 21B/e 21R, SES-BoMo-15A/-C129/-JI25, SPC-Bm36/-Bm40, WIV-BS-481/484, FPMI-CF-1/2/3, FPMI-CF-203, FPMI-CF-50/60/70, IPRI-CF-1/10/12, IPRI-Cf124, IPRI-CF-16/-16T, IPRI-CF-5/-6/-8, CP-1268, CP-169, CpDW1-15, IZD-Cp 4/13, IZD-CP1508/-CP2202/-CP2507/-CP0508, SIE-EO-801/-803, IPLB-Ekx4T/-Ekx4V, EA1174A, EA1174H, IAFEs-1, BCIRL-HA-AM1, CSIRO-BCIRL-HA1-3, CSIRO-BCIRL-HP1-5, BCIRL/AMCY-HzE-CLG1-9, BCIRL-HZ-AM1-3, IMC-HZ-1, IPLB-HZ-1074-5, IPLB-HZ-1079, IPLB-HZ-110, IPLB-HZ-124Q, BCIRL/AMCY-HvE-CLG1-3, BCIRL/AMCY-HvOV-CLG, BCIRL/AMCY-Hv-TS-GES, BCIRL-HV-AM1-2, IPLB-HvE1a/-It, IPLB-HvE1s, IPLB-HvE6a/-It, IPLB-HvE6s/-It, IPLB-HvT1, FTRS-HmA45, FTRS-HIL1-2, NIAS-LeSe-11 IPLB-LD-64-67, IPLB-LdEG/-LdEI/-LdEIt/-LdEp/-LdFB, IZD-LD1307/-LD1407, UMN-MDH-1, HPB-MB, IZD-MB0503/MB0504/MB1203/MB2006/2007/2506, MB-H260, MbL-3, NIAS-MaBr-85192/93, NIAS-MaBr-92, NIAS-MB-19/25/32, SES-MaBr-1/2/3/4/5, FPMI-MS-12/4/5/7, MRRL-CH-1/2, BPMNU-MyCo-1, IPLB-OE505A/s, IPLB-O1E7, IPRI-OL-12/13/4/9, BCIRL/AMCY-OnFB-GES1/2, UMC-OnE, FTRS-PhL, Px-58/-64, ORS-Pop-93/-95, BTI-PR10B/-PR8A1/-PR8A2/-PR9A, NIAS-PRC-819A/-819B/-819C, NYAES-PR4A, IAL-PID2, IPLB-PiE, UMN-PIE-1181, BCIRL/AMCY-PxLP-CLG, IPLB-PxE1/-PxE2, PX-1187, BCIRL-PX2-HNU3, BTI-Pu-2, BTI-Pu-A7/-A7S, BTI-Pu-B9, BTI-Pu-M, BTI-Pu-MIB, FRI-SpIm-1229, BCIRL/AMCY-ScE-CLG1/-CLG4/-CLG5, Se3FH, Se4FH, Se5FH, Se6FHA, Se6FHB, SeHe920-1a, UCR-SE-1, BCIRL/AMCY-SfTS-GES, IAL-SFD1, Sf1254, IPLB-Sf21AE, HPB-SL, SPC-SI-48/-52, UIV-SL-373/-573/-673, IBL-SLIA, NIV-SU-893/-992, BCIRL-503-HNU1/504-HNU4, BCIRL/AMCY-TnE-CLG1/-TnE-CLG1 MK, BCIRL/AMCY-TnE-CLG2/-TnE-LG2MK/-TnE-CLG3/-TnTS-GES1/-TnTS-GES3, BTI-TN5B1-4/-TN5C1/-TN5F2/-TN5G2A1/BTI-TN5G3/-TN5G33, IAL-TND1, IPLB-TN-R, and TN-368.

[0137] In a fifth aspect the present invention provides a method for producing an NPV alpha baculovirus clade Ia genome according to the first or second aspect of the invention comprising the step of chemically synthesizing all or part of the genome.

[0138] In this it is preferred that the part of the genome that flanks the regions that are deleted from the genome is synthesized. These parts are preferably inserted into a part of a native NPV-alpha baculovirus clade Ia genome to reconstitute a genome that is capable of forming an infectious nucleopolyhedrovirus. This can be achieved by using advanced recombination technologies such as ET recombination (in vitro and in vivo) (Zhang, Y, et al., (1998) Nature Genet., 20, 123-128, Hill, F. et al., (2000) Genomics, 64, 111-113.) to assemble these synthetic DNAs into the part of a native NPV-alpha baculovirus genome to yield functional virus.

[0139] In a sixth aspect the present invention provides a method for producing a NPV alpha baculovirus clade Ia virus by introducing a genome of the first or second aspect or a genome producible according to the method of the fifth aspect of the invention into a cell, preferably one of the cells indicated above regarding the fourth aspect

### BRIEF DESCRIPTION OF THE DRAWINGS

[0140] FIG. 1: Blueprint of the Baculovirus Genome. The annotated genome of Autographa californica multicapsid nuclear polyhedrosis virus (AcMNPV) is shown in a schematic representation (top). Genes are scored (bottom) on a scale from essential genes that are conserved (no deletion category, shades of green color to black) to non-essential genes (shown to be possibly deleteable, shades of red color). The classification applied is detailed in the legend (bottom). The annotated genome map was generated by a self-developed Perl program. Essential and non-essential genes are not randomly distributed but cluster in the genome. The upper semicircle is composed to 56% of the essential genes (and 44% of non-essential genes), the lower, more conserved semicircle is composed to 71% of essential genes (and 29% of non-essential genes).

[0141] FIG. 2: Shows an alignment of homologs of a protein tyrosine phosphatase present in NPV alpha baculovirus clade Ia viruses from 11 different NPV alpha baculovirus clade Ia viruses. To compile the proteins for this alignment the amino acid sequence of the protein tyrosine phosphatase AcMNPV according to SEQ ID NO: 13 was used in a PBLAST scarch of non-redundant protein sequences. The amino acid sequences of homologs of the protein tyrosine phosphatase from other NPV alpha baculovirus clade Ia viruses identified, comprised the following: a homolog from RoMNPV (SEQ ID NO: 14), a homolog from BmNPV (SEQ ID NO: 15), a homolog from MaviMNPV (SEQ ID NO: 16), a homolog from CfDefMNPV (SEQ ID NO: 17), a homolog of AgMNPV (SEQ ID NO: 18), a homolog from EppoNPV (SEQ ID NO: 19), a homolog from AnpeNPV (SEQ ID NO: 20), a homolog from CfMNPV (SEQ ID NO: 21), a homolog from OpMNPV (SEQ ID NO: 22), and a homolog from HycuNPV (SEQ ID NO: 23). Using such an alignment the position of the ptp gene in the genome of every NPV alpha baculovirus clade Ia virus can be determined and subsequently deleted.

[0142] FIG. 3: hr4 and hr5 containing region (bp 99.182 to 121.072 of the baculoviral genome). The original (wild-type) genome region is shown, with essential (black arrows) and non-essential (chequered arrows) gene regions high-lighted. Genes are annotated and hr regions indicated.

[0143] FIG. 4: Minimized hr4 and hr5 containing region. The synthetic designed DNA piece to replace the original DNA segment is shown, with deleted gene loci and maintained essential genes. A YFP expression cassette is introduced, as well as an antibiotic marker (Amp) flanked by two sites for homologous recombination.

[0144] FIG. 5: Experimental procedure of genome grafting for replacing the wild-type sequence with the designer DNA. First, the wild-type genomic region is eliminated by homologous recombination and replaced by a gentamycin marker (left and middle). Next, the synthetic designer DNA is assembled by biobrick method from three synthetic precursor DNAs (bottom right). By a second homologous recombination step, the synthetic DNA is introduces into the wild-type genome, replacing the gentamycin marker (left, bottom) giving rise to a hybrid genome that is partly wild-type and partly synthetic (SynBac1.0) as proof-of-concept (PoC).

[0145] FIG. 6: Genome analysis of SynBac1.0. The partly synthetic baculovirus genome containing the rewired designer DNA region was analyzed on the DNA level by analytical PCR, showing that the genes that were eliminated are indeed absent. The agarose gel on the left shows PCR amplification of selected genes of the wild-type BV genome, and the agarose gel on the right the same for the SynBac1.0 genome. The selection of genes represents a sampling of PCR amplified DNA, the absence or presence of which in the PCR experiment unambiguously shows that the original DNA is replaced by the synthetic DNA.

[0146] FIG. 7: Analysis of live SynBac1.0. A YFP fluorescence emission spectrum of the YFP expression in insect cells infected with serially passaged SynBac1.0 virus. The X-axis shows the wavelength (lambda) of the emission signal, and the Y-axis shows the fluorescence intensity in arbitrary units. B Coomassic Blue staining of the protein content of the infected cells. 1: Cell control, 2: Marker, 3 and 4: SyBac1.0, 5: Virus control. p10 (10 kDa protein visible at the bottom of the gel as a strong band), which is strongly expressed in the wild-type virus control infected cells, is not present in SynBac1.0 infected cells.

### EXAMPLES

[0147] The Examples are designed in order to further illustrate the present invention and serve the purpose to allow a better understanding of the invention. They are not to be construed as limiting the scope of the invention in any way.

### Example 1

[0148] The data used for creating the baculovirus genome map shown in FIG. 1 were derived from mining 1253 relevant papers found in NCBI PubMed and published up to October 2011 on information for e.g. genome sequences, gene essentiality and conservation, protein product function and localization, protein-protein interactions, mRNA expression and gene regulation.

[0149] All available database annotations on gene product function were collected from NCBI Genebank, NCBI Protein, NCBI VOG clusters of related viral proteins and the UniProt database by Perl programs. Additionally 53 baculovirus genomes available in October 2011 in the NCBI ReSeq nucleotide database were analyzed for orthologous protein genes by clustering protein sequences downloaded from the NCBI protein database with a Perl program, which piped the clustering program blastclust, a part of the NCBI C-toolkit legacy blast package (Vijayachandran LS, Thimiri Govinda Raj D B, et al (2013) Bioengineered 4:5, 1-9). Categories for conservation/variability were assigned for following different lineages of baculoviruses: all baculoviruses with conserved synteny (core+), all baculoviruses (core), lepidopteran baculoviruses, NPV (alphabaculoviruses), NPV clade I, NPV clade Ia, variable for next neighbours of AcMNPV, unique for AcMNPV). For gene essentiality classification the grades of gene conservation were integrated with published information on mRNA expression (no mRNA observed), expression in different developmental stages (immediate early, early, late, very late), content of stage-specific promoter motifs in the upstream regions and gene product function and localization indicating non-essentiality for virus propagation in cell culture (e.g. host interaction factors, oral infectivity factor, occlusion-derived virus or occlusion-body localized, other auxiliary proteins, some genes acquired from the host genome). Protein genes, which were already published as non-essential, were categorized as type 1 deletion category (deletion is harmless), that having no known mRNA expression or have been proven as non-essential in the next relatives of AcMNPV (like BmNPV) as type 2 (deletion is likely harmless), that having presumably non-essential functions and are variable in alphabaculoviruses or such protein genes having unknown functions and are variable in next neighbours as type 3 (deletion perhaps harmless) and that with suspect non-essential functions and variability in other Alphabaculovirus genomes but conservation in next relatives as type 4 (deletion perhaps harmless). The genome map was drawn by designing a Perl program, which imports a table of the categorized gene data and exports an image made by the Perl packages GD and GD::Simple.

### Example 2

[0150] According to Example 1, the inventors identified, by comparative genomic analyses and data mining, regions in the baculovirus genome that can be rewired advantageously to generate an improved baculovirus for drug discovery purposes.

[0151] For a proof-of-concept of this approach, the hr4 and hr5 containing region was chosen. This region is located between bp 99.182 and 121.072 on the baculoviral genome, and contains in addition to the hr4, hr5 regions 22 genes of which, based on the inventors' studies, 12 are non-essential and 10 are essential. In terms of size, this 22 kb segment contains less than 10 kb of essential DNA material including genes, promoters and terminators, and around 20 kb of DNA with functions the deletions of which can be tolerated or even be enhancing the performance of the virus in cell culture. The hr4, hr5 regions and their essential and non-essential portions are shown in FIG. 3.

[0152] The inventors designed a synthetic DNA corresponding to a rewired and minimized version of this segment (see FIG. 4). They created this piece of DNA from custom synthesized DNA pieces by applying BioBrick methods (see Sleight C. S. et al Nucleic Acids Res. 2010).

[0153] Next, they used homologous recombination techniques (see Zhang Y et al Nat. Biotechnology (2000) to graft this synthetic DNA into the wild-type baculoviral genome, replacing the original wild-type sequence in this segment with the designer DNA (see FIG. 5). The partly synthetic baculovirus genome containing the rewired designer DNA region was analyzed on the DNA level by analytical PCR, showing that the genes that were eliminated are indeed absent (see FIG. 6). To assess viability of the virus, insect cells were infected with serially passaged Synbac1.0 virus and the expression of YFP from the viral backbone was measured (see FIG. 7A). This demonstrates that SynBac1.0 is infectious and viable. Also, the protein content of the infected cells was examined with respect to exemplary proteins. p10 (10kD mass, shown as an representative example) was clearly absent in the infected cells, although this protein is strongly expressed protein in the wild-type baculovirus (see FIG. 7 B).

[0154] Thus, the resulting hybrid (i.e. partly synthetic, partly wild-type) baculoviral genome (SynBac1.0) proved to be fully functional, infectious and able to produce heterologous protein. This shows that the approach of the invention can be reduced to practice.

1. An Autographa californica multicapsid nucleopolyhedrovirus (AcMNPV) genome, wherein the number of base pairs is reduced in comparison to a native AcMNPV genome by at least 25.7% and which assembles into an infectious baculovirus.

2. The AcMNPV genome according to claim 1 lacking at least one gene selected from one of the following groups consisting of:
ac85, ac116, cg30, hcf-1, ac56, and pcna;
ac44, ac57, ac84, ac112/113 Ct, ac112/113 Nt, ac118, ac122, ac152, ie-01 and hispP;
ac11, ac30, eta, ac63, 15k, ac97, ac121, ac140, ac146 and ac149; and
odv-e66, p43, odv-nc42 or odv-e56, ptp, bro, ctx, orf603, polyhedrin, egt, bv/odv-e26, ac18, pif-2, env-prot, iap-1, sod, fgf, vubi, gp37, ac69, iap-2, pnk/pn1, ac91, odv-e28 pif-4, pif-3, pif-1, pk-2, chiA, v-cath, pp34, 94K, p26, p10, p74, ac145, and ac150.

3-5. (canceled)

6. The AcMNPV genome according to claim 1 lacking at least one gene selected from the group consisting of pif-1, p26, p10, p74, pif-3, ac116, ac117, ac118, ac121, ac122, pk-2, chiA, v-cath, pp34 and 94K, wherein pif-1 and chiA are partially deleted such that the promoter regions of the adjacent genes remain.

7. An Autographa californica multicapsid nucleopolyhedrovirus (AcMNPV) genome, lacking at least one gene selected from the group consisting of pif-1, p26, p10, p74, pif-3, ac116, ac117, ac118, ac121, ac122, pk-2, chiA, v-cath, pp34 and 94K, of which pif-1 and chiA may only be partially deleted such that the promoter regions of the adjacent genes remain, and which assembles into an infectious baculovirus.

8. The AcMNPV genome according to claim 1, wherein the genome is further lacking the 5′-UTR and/or 3′-UTR of the genes, the spacers 5′ and/or 3′ of the genes, and/or one or more of the heterologous repeat sequences.

9-10. (canceled)

11. The AcMNPV genome according to claim 1 comprising at least one of the following:
genes encoding helicase, 38K, lef-5, 49K and odv-e18+28;
genes encoding lef-2, lef-1, p47, lef-8 vp1054, lef-9, dnapo1, ac66, vlf-1, gp41, ac81, p95, capsid, lef-4, P33, p18, odv-e25, p6.9, odv-ec43, alk-exo, and odv-ec27;
genes encoding pk-1, 38.7K, dbp, lef-6, ac29, 39K, lef-11, ac38, ac53, fp, lef-3, ac75, ac76, ac78 tlp20, p40, p12, p48, ac106/107 Nt, ac106/107 Ct, ac110, me53 and ie-1:
genes encoding ac12, ac34, ac55, and ac108;
genes encoding ac4, ac5, orf1629, ac17+45, ac19, arif-1 Ct, arif-1 Nt, pkip, ac26, lef-12, ac43, ac48, bidp, ac72, ac73, ac74, ac79, ac11, ac114, ac120, ac124, lef-7, gp67, gp16, ac132, ie-2, pe38; and
genes encoding ac45, ac47, ac52+71, he65, 35K and ac154;

12-16. (canceled)

17. The AcMNPV genome according to claim 1, comprising at least one of the genes of the group consisting of ac120, ac124, lef-7, gp64/67, p24, gp16, ac132, alk-exo, and 35K.

18. A Bombyx mori nucleopolyhedrovirus (BmNPV) genome, wherein the number of base pairs is reduced in comparison to a native BmNPV genome by at least 18.31% and which assembles into an infectious baculovirus.

19. The BmNPV genome according to claim 18 lacking at least one gene selected from the group consisting of bm45 ac56, cg30, and bm95a ac116.

20. The BmNPV genome according to claim 18 lacking at least one gene selected from the group consisting of bm35 ac44, odv-e66, bm46 ac57, and bm99 ac122.

21. The BmNPV genome according to claim 18 lacking at least one gene selected from the group consisting of bm4 ac11, bm51 ac63, 15K, bm98a ac121, bm122 ac146, and bm125 ac149.

22. The BmNPV genome according to claim 18 lacking at least one gene selected from the group consisting of polyhedrin, egt, bv/odv-e26, bm10 ac18, pif-2, env-prot, iap-1, fgf, v-ubi, bm57 ac69, bm74 ac91, pif-3, pif-1, chi-a, v-cath, pp34, bm110a 94K ac134, p26, p10, p74, bm121/ac145, bm126 ac150, ptp, bro-d, gta, and gp37.

23. The BmNPV genome according to claim 18 further lacking the 5′-UTR and/or 3′-UTR of the genes, lacking the spacers 5′ and/or 3′ of the genes, and/or lacking one or more of the heterologous repeat sequences.

24-25. (canceled)

26. A AcMNPV genome according to claim 1 or a BmNPV genome according to claim 18 further comprising a nucleotide sequence heterologous to the AvMNPV or BmNPV genome.

27. The AvMNPV genome according to claim 26, wherein the heterologous nucleotide sequence comprises a Tn7 site, a nucleotide sequence encoding a resistance gene, a Homing endonuclease site, a mutated fp gene, loxP sites, IE1/polyhedrin/p10 promoter, and/or a nucleotide sequence encoding a fluorescent protein.

28. An infectious AvMNPV virus comprising a genome according to claim 1.

29. An infectious BmNPV virus comprising a genome according to claim 18.

30. A cell infected with a virus according to claim 28 or 29.

31. The cell according to claim 27, wherein the cell is selected from the group consisting of Ao/I, Hi5, Sf9, Sf21, Ao38, Drosophila S2, T.ni, FTRS-AoL1/-AoL2/-AfL, BCIRL/AMCY-AiOV-CLG, BCIRL/AMCY-AiTS-CLG, HCRL-ATO10/ATO20, BCIRL/AMCY-AfOV-CLG, BCIRL/AMCY-AfTS-CLG, RML-2, NISES-AnPe-426, NISES-Anya-0611, BCIRL/AMCY-AgE-CLG-1/2/3, UFL-AG-286, FTRS-AbL81, SES-Bma-O1A/R, Bm-N/-5/-21E-HNU5, NIV-BM-1296/-197, SES-Bm-130A/30R/e 21A/e 21B/e 21R, SES-BoMo-15A/-C129/-JI25, SPC-Bm36/-Bm40, WIV-BS-481/484, FPMI-CF-1/2/3, FPMI-CF-203, FPMI-CF-50/60/70, IPRI-CF-1/10/12, IPRI-Cf124, IPRI-CF-16/-16T, IPRI-CF-5/-6/-8, CP-1268, CP-169, CpDW1-15, IZD-Cp 4/13, IZD-CP1508/-CP2202/-CP2507/-CP0508, SIE-EO-801/-803, IPLB-Ekx4T/-Ekx4V, EA1174A, EA1174H, IAFEs-1, BCIRL-HA-AM, CSIRO-BCIRL-HA1-3, CSIRO-BCIRL-HP 1-5, BCIRL/AMCY-HzE-CLG1-9, BCIRL-HZ-AM1-3, IMC-HZ-1, IPLB-HZ-1074-5, IPLB-HZ-1079, IPLB-HZ-110, IPLB-HZ-124Q, BCIRL/AMCY-HvE-CLG1-3, BCIRL/AMCY-HvOV-CLG, BCIRL/AMCY-Hv-TS-GES, BCIRL-HV-AM1-2, IPLB-HvE1a/-It, IPLB-HvE1s, IPLB-HvE6a/-It, IPLB-HvE6s/-It, IPLB-HvT1, FTRS-HmL45, FTRS-HIL1-2, NIAS-LeSe-11 IPLB-LD-64-67, IPLB-LdEG/-LdEI/-LdEIt/-LdEp/-LdFB, IZD-LD1307/-LD1407, UMN-MDH-1, HPB-MB, IZD-MB0503/MB0504/MB1203/MB2006/2007/2506, MB-H260, MbL-3, NIAS-MaBr-85/92/93, NIAS-MaBr-92, NIAS-MB-19/25/32, SES-MaBr-1/2/3/4/5, FPMI-MS-12/4/5/7, MRRL-CH-1/2, BPMNU-MyCo-1, IPLB-O1E505A/s, IPLB-O1E7, IPRI-OL-12/13/4/9, BCIRL/AMCY-OnFB-GES1/2, UMC-OnE, FTRS-PhL, Px-58/-64, ORS-Pop-93/-95, BTI-PRIOB/-PR8A1/-PR8A2/-PR9A, NIAS-PRC-819A/-819B/-819C, NYAES-PR4A, IAL-PID2, IPLB-PiE, UMN-PIE-1181, BCIRL/AMCY-PxLP-CLG, IPLB-PxE1/-PxE2, PX-1187, BCIRL-PX2-HNU3, BTI-Pu-2, BTI-Pu-A7/-A7S, BTI-Pu-B9, BTI-Pu-M, BTI-Pu-MIB, FRI-SpIm-1229, BCIRL/AMCY-SeE-CLG/-CLG4/-CLG5, Se3FH, Se4FH, Se5FH, Se6FHA, Se6FHB, SeHe920-1a, UCR-SE-1, BCIRL/AMCY-SfTS-GES, IAL-SFD1, Sf1254, IPLB-Sf21AE, HPB-SL, SPC-SI-48/-52, UIV-SL-373/-573/-673, IBL-SLIA, NIV-SU-893/-992, BCIRL-503-HNU1/504-HNU4, BCIRL/AMCY-TnE-CLG 1/-TnE-CLG1MK, BCIRL/AMCY-TnE-CLG2/-TnE-LG2MK/-TnE-CLG3/-TnTS-GE3/-TnTS-GES3, BTI-TN5B1-4/-TN5C1/-TN5F2/-TN5G2A1/BTI-TN5G3/-TN5G33, IAL-TND1, IPLB-TN-R, and TN-368.

32. A method for producing an AvMNPV genome according to claim 1, or a BmNPV genome according to claim 15 or a AvMNPV or BmNPV genome according to claim 26 comprising the step of chemically synthesizing all or part of the genome.

33. The method according to claim 32, wherein the part of the genome flanks the regions that are deleted from the genome.

34. The method according to claim 32, wherein the part of the genome is inserted into a part of a native genome to reconstitute a genome that is capable of forming an infectious nucleopolyhedrovirus.

35. A method for producing a AcMNPV or BmNPV virus by introducing a genome of claim 1 or claim 18, respectively, or chemically synthesizing all or part of the genome, into a cell.

36. The BmNPV genome according to claim 26, wherein the heterologous nucleotide sequence comprises a Tn7 site, a nucleotide sequence encoding a resistance gene, a Homing endonuclease site, a mutated fp gene, loxP sites, IE1/polyhedrin/p10 promoter, and/or a nucleotide sequence encoding a fluorescent protein.

The application's sequence listing, which the Patent Office published only in electronic form, follows.

SEQUENCE LISTING (23 sequences)

SEQ ID NO: 1 - DNA, 133894 bp, Autographa californica nucleopolyhedrovirus
gaattctacccgtaaagcgagtttagttttgaaaaacaaatgacatcatttgtataatgacatcatcccctgattgtgttttacaagtagaattctatccgtaaagcgagttcagttttgaaaacaaatgagtcatacctaaacacgttaataatcttctgatatcagcttatgactcaagttatgagccgtgtgcaaaacatgagataagtttatgacatcatccactgatcgtgcgttacaagtagaattctactcgtaaagccagttcggttatgagccgtgtgcaaaacatgacatcagcttatgactcatacttgattgtgttttacgcgtagaattctactcgtaaagcgagttcggttatgagccgtgtgcaaaacatgacatcagcttatgagtcataattaatcgtgcgttacaagtagaattctactcgtaaagcgagttgaaggatcatatttagttgcgtttatgagataagattgaaagcacgtgtaaaatgtttcccgcgcgttggcacaactatttacaatgcggccaagttataaaagattctaatctgatatgttttaaaacacctttgcggcccgagttgtttgcgtacgtgactagcgaagaagatgtgtggaccgcagaacagatagtaaaacaaaaccctagtattggagcaataatcgatttaaccaacacgtctaaatattatgatggtgtgcattttttgcgggcgggcctgttatacaaaaaaattcaagtacctggccagactttgccgcctgaaagcatagttcaagaatttattgacacggtaaaagaatttacagaaaagtgtcccggcatgttggtgggcgtgcactgcacacacggtattaatcgcaccggttacatggtgtgcagatatttaatgcacaccctgggtattgcgccgcaggaagccatagatagattcgaaaaagccagaggtcacaaaattgaaagacaaaattacgttcaagatttattaatttaattaatattatttgcattctttaacaaatactttatcctattttcaaattgttgcgcttcttccagcgaaccaaaactatgcttcgcttgctccgtttagcttgtagccgatcagtggcgttgttccaatcgacggtaggattaggccggatattctccaccacaatgttggcaacgttgatgttacgtttatgcttttggttttccacgtacgtcttttggccggtaatagccgtaaacgtagtgccgtcgcgcgtcacgcacaacaccggatgtttgcgcttgtccgcggggtattgaaccgcgcgatccgacaaatccaccactttggcaactaaatcggtgacctgcgcgtcttttttctgcattatttcgtctttcttttgcatggtttcctggaagccggtgtacatgcggtttagatcagtcatgacgcgcgtgacctgcaaatctttggcctcgatctgcttgtccttgatggcaacgatgcgttcaataaactcttgttttttaacaagttcctcggttttttgcgccaccaccgcttgcagcgcgtttgtgtgctcggtgaatgtcgcaatcagcttagtcaccaactgtttgctctcctcctcccgttgtttgatcgcgggatcgtacttgccggtgcagagcacttgaggaattacttcttctaaaagccattcttgtaattctatggcgtaaggcaatttggacttcataatcagctgaatcacgccggatttagtaatgagcactgtatgcggctgcaaatacagcgggtcgccccttttcacgacgctgttagaggtagggcccccattttggatggtctgctcaaataacgatttgtatttattgtctacatgaacacgtatagctttatcacaaactgtatattttaaactgttagcgacgtccttggccacgaaccggacctgttggtcgcgctctagcacgtaccgcaggttgaacgtatcttctccaaatttaaattctccaattttaacgcgagccattttgatacacgtgtgtcgattttgcaacaactattgttttttaacgcaaactaaacttattgtggtaagcaataattaaatatgggggaacatgcgccgctacaacactcgtcgttatgaacgcagacggcgccggtctcggcgcaagcggctaaaacgtgttgcgcgttcaacgcggcaaacatcgcaaaagccaatagtacagttttgatttgcatattaacggcgattttttaaattatcttatttaataaatagttatgacgcctacaactccccgcccgcgttgactcgctgcacctcgagcagttcgttgacgccttcctccgtgtggccgaacacgtcgagcgggtggtcgatgaccagcggcgtgccgcacgcgacgcacaagtatctgtacaccgaatgatcgtcgggcgaaggcacgtcggcctccaagtggcaatattggcaaattcgaaaatatatacagttgggttgtttgcgcatatctatcgtggcgttgggcatgtacgtccgaacgttgatttgcatgcaagccgaaattaaatcattgcgattagtgcgattaaaacgttgtacatcctcgcttttaatcatgccgtcgattaaatcgcgcaatcgagtcaagtgatcaaagtgtggaataatgttttctttgtattcccgagtcaagcgcagcgcgtattttaacaaactagccatcttgtaagttagtttcatttaatgcaactttatccaataatatattatgtatcgcacgtcaagaattaacaatgcgcccgttgtcgcatctcaacacgactatgatagagatcaaataaagcgcgaattaaatagcttgcgacgcaacgtgcacgatctgtgcacgcgttccggcacgagctttgattgtaataagtttttacgaagcgatgacatgacccccgtagtgacaacgatcacgcccaaaagaactgccgactacaaaattaccgagtatgtcggtgacgttaaaactattaagccatccaatcgaccgttagtcgaatcaggaccgctggtgcgagaagccgcgaagtatggcgaatgcatcgtataacgtgtggagtccgctcattagagcgtcatgtttagacaagaaagctacatatttaattgatcccgatgattttattgataaattgaccctaactccatacacggtattctacaatggcggggttttggtcaaaatttccggactgcgattgtacatgctgttaacggctccgcccactattaatgaaattaaaaattccaattttaaaaaacgcagcaagagaaacatttgtatgaaagaatgcgtagaaggaaagaaaaatgtcgtcgacatgctgaacaacaagattaatatgcctccgtgtataaaaaaaatattgaacgatttgaaagaaaacaatgtaccgcgcggcggtatgtacaggaagaggtttatactaaactgttacattgcaaacgtggtttcgtgtgccaagtgtgaaaaccgatgtttaatcaaggctctgacgcatttctacaaccacgactccaagtgtgtgggtgaagtcatgcatcttttaatcaaatcccaagatgtgtataaaccaccaaactgccaaaaaatgaaaactgtcgacaagctctgtccgtttgctggcaactgcaagggtctcaatcctatttgtaattattgaataataaaacaattataaatgctaaatttgttttttattaacgatacaaaccaaacgcaacaagaacatttgtagtattatctataattgaaaacgcgtagttataatcgctgaggtaatatttaaaatcattttcaaatgattcacagttaatttgcgacaatataattttattttcacataaactagacgccttgtcgtcttcttcttcgtattccttctctttttcatttttctcctcataaaaattaacatagttattatcgtatccatatatgtatctatcgtatagagtaaattttttgttgtcataaatatatatgtcttttttaatggggtgtatagtaccgctgcgcatagtttttctgtaatttacaacagtgctattttctggtagttcttcggagtgtgttgctttaattattaaatttatataatcaatgaatttgggatcgtcggttttgtacaatatgttgccggcatagtacgcagcttcttctagttcaattacaccattttttagcagcaccggattaacataactttccaaaatgttgtacgaaccgttaaacaaaaacagttcacctcccttttctatactattgtctgcgagcagttgtttgttgttaaaaataacagccattgtaatgagacgcacaaactaatatcacaaactggaaatgtctatcaatatatagttgctgatatcatggagataattaaaatgataaccatctcgcaaataaataagtattttactgttttcgtaacagttttgtaataaaaaaacctataaatatgccggattattcataccgtcccaccatcgggcgtacctacgtgtacgacaacaagtactacaaaaatttaggtgccgttatcaagaacgctaagcgcaagaagcacttcgccgaacatgagatcgaagaggctaccctcgaccccctagacaactacctagtggctgaggatcctttcctgggacccggcaagaaccaaaaactcactctcttcaaggaaatccgtaatgttaaacccgacacgatgaagcttgtcgttggatggaaaggaaaagagttctacagggaaacttggacccgcttcatggaagacagcttccccattgttaacgaccaagaagtgatggatgttttccttgttgtcaacatgcgtcccactagacccaaccgttgttacaaattcctggcccaacacgctctgcgttgcgaccccgactatgtacctcatgacgtgattaggatcgtcgagccttcatgggtgggcagcaacaacgagtaccgcatcagcctggctaagaagggcggcggctgcccaataatgaaccttcactctgagtacaccaactcgttcgaacagttcatcgatcgtgtcatctgggagaacttctacaagcccatcgtttacatcggtaccgactctgctgaagaggaggaaattctccttgaagtttccctggtgttcaaagtaaaggagtttgcaccagacgcacctctgttcactggtccggcgtattaaaacacgatacattgttattagtacatttattaagcgctagattctgtgcgttgttgatttacagacaattgttgtacgtattttaataattcattaaatttataatctttagggtggtatgttagagcgaaaatcaaatgattttcagcgtctttatatctgaatttaaatattaaatcctcaatagatttgtaaaataggtttcgattagtttcaaacaagggttgtttttccgaaccgatggctggactatctaatggattttcgctcaacgccacaaaacttgccaaatcttgtagcagcaatctagctttgtcgatattcgtttgtgttttgttttgtaataaaggttcgacgtcgttcaaaatattatgcgcttttgtatttctttcatcactgtcgttagtgtacaattgactcgacgtaaacacgttaaataaagcttggacatatttaacatcgggcgtgttagctttattaggccgattatcgtcgtcgtcccaaccctcgtcgttagaagttgcttccgaagacgattttgccatagccacacgacgcctattaattgtgtcggctaacacgtccgcgatcaaatttgtagttgagctttttggaattatttctgattgcgggcgtttttgggcgggtttcaatctaactgtgcccgattttaattcagacaacacgttagaaagcgatggtgcaggcggtggtaacatttcagacggcaaatctactaatggcggcggtggtggagctgatgataaatctaccatcggtggaggcgcaggcggggctggcggcggaggcggaggcggaggtggtggcggtgatgcagacggcggtttaggctcaaatgtctctttaggcaacacagtcggcacctcaactattgtactggtttcgggcgccgtttttggtttgaccggtctgagacgagtgcgatttttttcgtttctaatagcttccaacaattgttgtctgtcgtctaaaggtgcagcgggttgaggttccgtcggcattggtggagcgggcggcaattcagacatcgatggtggtggtggtggtggaggcgctggaatgttaggcacgggagaaggtggtggcggcggtgccgccggtataatttgttctggtttagtttgttcgcgcacgattgtgggcaccggcgcaggcgccgctggctgcacaacggaaggtcgtctgcttcgaggcagcgcttggggtggtggcaattcaatattataattggaatacaaatcgtaaaaatctgctataagcattgtaatttcgctatcgtttaccgtgccgatatttaacaaccgctcaatgtaagcaattgtattgtaaagagattgtctcaagctcggatcccgcacgccgataacaagccttttcatttttactacagcattgtagtggcgagacacttcgctgtcgtcgacgtacatgtatgctttgttgtcaaaaacgtcgttggcaagctttaaaatatttaaaagaacatctctgttcagcaccactgtgttgtcgtaaatgttgtttttgataatttgcgcttccgcagtatcgacacgttcaaaaaattgatgcgcatcaattttgttgttcctattattgaataaataagattgtacagattcatatctacgattcgtcatggccaccacaaatgctacgctgcaaacgctggtacaattttacgaaaactgcaaaaacgtcaaaactcggtataaaataatcaacgggcgctttggcaaaatatctattttatcgcacaagcccactagcaaattgtatttgcagaaaacaatttcggcgcacaattttaacgctgacgaaataaaagttcaccagttaatgagcgaccacccaaattttataaaaatctattttaatcacggttccatcaacaaccaagtgatcgtgatggactacattgactgtcccgatttatttgaaacactacaaattaaaggcgagctttcgtaccaacttgttagcaatattattagacagctgtgtgaagcgctcaacgatttgcacaagcacaatttcatacacaacgacataaaactcgaaaatgtcttatatttcgaagcacttgatcgcgtgtatgtttgcgattacggattgtgcaaacacgaaaactcacttagcgtgcacgacggcacgttggagtattttagtccggaaaaaattcgacacacaactatgcacgtttcgtttgactggtacgccgtcggcgtgttaacatacaagttgctaaccggcggccgacacccatttgaaaaaagcgaagacgaaatgttggacttgaatagcatgaagcgtcgtcagcaatacaatgacattggcgttttaaaacacgttcgtaacgttaacgctcgtgactttgtgtactgcctaacaagatacaacatagattgtagactcacaaattacaaacaaattataaaacatgagtttttgtcgtaaaaatgccacttgttttacgagtagaattctacgtgtaacacacgatctaaaagatgatgtcattttttatcaatgactcatttgttttaaaacagacttgttttacgagtagaattctacgtgtaaagcatgatcgtgagtggtgttaataaaatcataaaaattattgtaaatgtttattatttaaaaacgattcaaatatataataaaaacaatctacatctatttcttcacaatccataacacacaacaggtccatcaatgagtttttgtctttatccgacatactatgtgcatgtaacaaatcaaatacatcttttaaatttttatacacatctttacattgtctaccaaaatctttaataaccctataacaaggaaaagacttttcttcttgcgtggttttgccgcgcagatattgaaataaaatgtgcatgcacgacaacttgtgtttactaaaatgctccttgcctataccgcaaaaccggccatacatttcggcgattacacgcggacaattgtacgattcgtctacgtgtaaacgatcatcataatcactcttgcgcaaacgaataaattttttcaccgcttccgacaaacgaggcaccaattcggcgggcacgcttcgatacattattctgtgcacataagttaccacacaaaatttattgtaccaccatccgacaacgtcgttattagggttgaacacgttggcgatgcgcagcagtttcccgtttctcatgaaatattcaaagcggcccaaaataatttgcaagcaatccaacatgtcttgagaaatttctcgttcaaaattgttcaaagagaatatctgccatccgttttgaacgcgcacgctgacgggaaccaccgcatcgatttgctccaacacttcacggacgttatcgtcgatgcccatcgtttcgctggtgctgaaccaatgggaaaggctcttgatggaatcgcccgcgtctatcatcttgaccgcttcgtcaaaggtgcaactgccgctcttcaaacgccgcatagcggtcacgtcccgctctatgcacgacataccgtttacgtacgattctgataggtattcctgaactatacggtaatggtgatacgactcgccatacacgtcgtgcacctcattgtatttagcataataattgtaaattattaactttgcagcgagagacatgttgtcagtaaagcggtgctaggctcaataatactgatgtacaggcacgcgtgctatttatatataatttcgcaaggaggggagctgttatcggttgctattattaaagaatggccgtctgtttttatcacaagcttggcagcctcaaccatgaagcgtcgtcattgtaaattaaattctctgcctcaagaattatttgacaagattgtcgagtatttatctttatctgattactgcaatttggtgcttgtctgtaaaagaccttctagtaaatataacgtgatatttgatagtactaatcaccaacatttgaaaggcgtgtacaaaaagacagacgtgcaaataacaagctacaacgaatacatcaactgtatttgcaacgaactgagacaagacgaattctatgccaaatcatcatggattgcgagtatttgcggtcaccagagagcgacaatttttagtgtaacaaataaacaagtagaaatgaaatatcatttgtataatatagcaattgtggaaagtgaagattgcaacggattttacccatttgagccaacgcgcgattgtttaatatgcaaacaaaaaaaccaatgtcctcgtaattcatttattgtttcgttgtgtaaatatttagaaaaacaaaatgtacaatcaaactttatatattatttatacgaaataaatacataataataactattatacatgtttttattttacaatacttcctgtataacctctctaactacattaggagtacaatccacgtcaattacacgtttagctatttttctaattttgtaatgtttatcgtagagtttttcgttaatacattgaatagccaacaagggatttgggtgcacaccgtcatagagtacttccatgtcgtcttcaaagcgcatttttcgcttgcgaaaatgccgctcttggcccaaaacaaaagcgagtttgatgcggtcgtcgatgcgttccgaaaatacggccaaatgctggtgtttggtgatgtcgcgcggaaacgtcaccgtgccatttttgctttccgccacgacggcggttttcaatttttcggccgactgcagcatgttaagtttggcgtcgagttcgtgcaaacgcaattcaaactgctcaaacctgttgcccacctcgttcttgaacgtctcgtgggtgaccataaatttttcgctgtttgcattcagtttctttacatgttttaaaacagattcaatcttgtcgcgcaaatcatcacgctcgccttcagtttgaatgtgcagcaacgcgttgcttttgttggcaaaatttaaccgcatcaaaatttccaacaacccgtgcttggtcgcgaacaatgcgcccaacgagttgagatcgcgtttggatctctgtttgtgaaaaacaatttcgtttaaatggtaaacttgatcgccgtcccaattgcaatcaagtatgtcgtcgtgcgcaatttcaagacctttgcaaaaatctatcacattgtagcattttgcgttcgtgtcgctgtgcacgtatctgtacttgaaactgtgcgtgttgcatttgaatgagtcccatttaacgatgtgcgaccattgttgggcgtttatgtggtactttttgtagtcgtctgcattgaaccgatcttcggcggcgatggcgtcgttgtcgttgtcaccggaccacatccaccagttccataaccaggatagcattgctttagcttgtctagcaattcctttgttatacaacgagaaaatttcgttcccttataattatagctgtacggtgcgcgtatttgtttgttaacgttacaaaaaatatccctgtccacgtccggccaatactgcaacgtgagcgcgtccaagtttgaatcttgcatatgcggaacgtacaaacgtacggcctctctcacacaatgcgcaaaactgcccggctgaatgtaatcactgtccaactttgcaggtttctcgaaagccttgtaccgatgcacgcgaacattttgagcggacgtgattttaaacttgtcggtgaattttaaccacaaatgaaatccacggttgccggtatacatgactcttgacacgttctcttccgtgtaaaacaacagaaacgccgtggcgccaatgtaaattttcagcattaaatcgtgttcgtcaacataatttttgtaatcggcgtctacgacccattccctgccgccgccgtcgtccaacggtttgacgtgcacgtcggacactttgttttgcacaatataactatacaattgtgcggaggtatcaaaatatctgtcggcgtgaatccagcgcgcgttgaccgtcatgaacgcgtacttgcggctgtcgttgtacgcaatggcgtcccacatcatgtcgacgcgcttctgcgtataattgcacactaacatgttgccctttgaacttgacctcgattgtgttaatttttggctataaaaaggtcaccctttaaaatttgttacataatcaaattaccagtacagttattcggtttgaagcaaaatgactattctctgctggcttgcactgctgtctacgcttactgctgtaaatgcggccaatatattggccgtgtttcctacgccagcttacagccaccatatagtgtacaaagtgtatattgaagcccttgccgaaaaatgtcacaacgttacggtcgtcaagcccaaactgtttgcgtattcaactaaaacttattgcggtaatatcacggaaattaatgccgacatgtctgttgagcaatacaaaaaactagtggcgaattcggcaatgtttagaaagcgcggagtggtgtccgatacagacacggtaaccgccgctaactacctaggcttgattgaaatgttcaaagaccagtttgacaatatcaacgtgcgcaatctcattgccaacaaccagacgtttgatttagtcgtcgtggaagcgtttgccgattatgcgttggtgtttggtcacttgtacgatccggcgcccgtaattcaaatcgcgcctggctacggtttggcggaaaactttgacacggtcggcgccgtggcgcggcaccccgtccaccatcctaacatttggcgcagcaatttcgacgacacggaggcaaacgtgatgacggaaatgcgtttgtataaagaatttaaaattttggccaacatgtccaacgcgttgctcaaacaacagtttggacccaacacaccgacaattgaaaaactacgcaacaaggtgcaattgcttttgctaaacctgcatcccatatttgacaacaaccgacccgtgccgcccagcgtgcagtatcttggcggaggaatccatcttgtaaagagcgcgccgttgaccaaattaagtccggtcatcaacgcgcaaatgaacaagtcaaaaagcggaacgatttacgtaagttttgggtcgagcattgacaccaaatcgtttgcaaacgagtttctttacatgttaatcaatacgttcaaaacgttggataattacaccatattatggaaaattgacgacgaagtagtaaaaaacataacgttgcccgccaacgtaatcacgcaaaattggtttaatcaacgcgccgtgctgcgtcataaaaaaatggcggcgtttattacgcaaggcggactacaatcgagcgacgaggccttggaagccgggatacccatggtgtgtctgcccatgatgggcgaccagttttaccatgcgcacaaattacagcaactcggcgtagcccgcgccttggacactgttaccgtttccagcgatcaactactagtggcgataaacgacgtgttgtttaacgcgcctacctacaaaaaacacatggccgagttatatgcgctcatcaatcatgataaagcaacgtttccgcctctagataaagccatcaaattcacagaacgcgtaattcgatatagacatgacatcagtcgtcaattgtattcattaaaaacaacagctgccaatgtaccgtattcaaattactacatgtataaatctgtgttttctattgtaatgaatcacttaacacacttttaattacgtcaataaatgttattcaccattatttacctggtttttttgagaggggctttgtgcgactgcgcacttccagcctttataaacgctcaccaaccaaagcaggtcattattgtgccaggacgttcaaaggcgaaacatcgaaatggagtctgttcaaacgcgcttatgtgccagtagcaatcaatttgctccgttcaaaaagcgccagcttgccgtgccggtcggttctgtgaacagtttgacacacaccatcacctccaccaccgtcaccagcgtgattccaaaaaattatcaagaaaaacgtcagaaaatatgccacataatatcttcgttgcgtaacacgcacttgaatttcaataagatacagtctgtacataaaaagaaactgcggcatttgcaaaatttgctaagaaaaaagaacgaaattattgccgagttggttagaaaacttgaaagtgcacagaagaagacaacgcacagaaatattagtaaaccagctcattggaaatactttggagtagtcagatgtgacaacacaattcgcacaattattggcaacgaaaagtttgtaaggagacgtttggccgagctgtgcacattgtacaacgccgagtacgtgttttgccaagcacgcgccgatggagacaaagatcgacaggcactagcgagtctgctgacggcggcgtttggttcgcgagtcatagtttatgaaaatagtcgccggttcgagtttataaatccggacgagattgctagtggtaaacgtttaataattaaacatttgcaagatgaatctcaaagtgatattaacgcctattaatttgaaaggtgaggaagagcccaattgcgttgagcgcattaccataatgccatgtattttaatagatactgagatctgtttaaatgtcagatgccgttctccttttgccaaattcaaagtattgattattgtagatggctttgatagcgcttatattcaggctaccttttgtagcattagcgatagtgtaacaattgttaacaaatctaacgaaaagcatgtaacgtttgacgggtttgtaaggccggacgatgaaggtacaacaatgccttatgtcattggaccattatattctgtcgacgctgctgtcgccgaccgtaaagtgaaggacgtggtggattcaattcaaaaccaacagacaatgttaaaagtatttattaacgaggctaatgtgtataacaaatggaatatgcttaaaggtttaatttataataataacaatgaatctgttttagtaaaataatgtagtaaaatttataaaggtagataaaaattataatattaataaaaaaaataatgttactaaatgggttcctgcgttaaattattttacgggtagacagctattaactattttatttatttttaaatttaaataaatgtattgttagaaaattgtgttgttttattagtataacgaaaaaatacatgacataaaccgcttccaattttggtcacacaaactcttgtgtggatagtttacgtaatgagttaaataggcgggcagttgtccgctaaacgtgtcggtggtcaagtagatgtgcattaatttacgacaacccaaagcggggccgcttatgtcaagtatttttttcacaaaattggtaatggtttcgttttgttccttgtacaaacacatgtcggtgtgatcgttgacgcacgagttgtacgattccgccggcaggttggcaaacaagcgcttgagatgcttgagtctgcgttcaattttataatcaaacttgttggtgaaaatgtctttcagcaagcacattaactggtcgttcaaaacgcgctgcaacgacgacaccaacacatgatattcgtttccaaaaagcgaaaaatttttgatgcagcggtccgcgttgaagggtcgtttcataatgcgcacgttgacaaaaaacacgttgaaagacagcggggctgtggttattttaacgccgttgtcggtatactcgtcgacgccgtctgcgcttgttatgtcaatttgtagcgcaaatctaaccaaatcaaactcatcgttgtactgtgtctttatgcattttatatggcggtttaagtgcaagttgatttggccgtttaatctataggctccgttttgataacatttcagcactaccaacggatccgacatgtaaacttgacgcgttagcacgtccaattcagcgtaatgttggtcgacgcatttttgtaaattagtttgcaggttgcaaaacatttttgcgcaaaagccgtaatagtcaaaatctatgcattttaatgcgcttctgtcgtcgtcaatatggcatgtcacggctgcgcctccagttaacacgaataaaccgccgttttcgcaaactacggcttcgaaacaatctttgataaatgccaactttgctttagccacaattttatcgcgcaggcgatcttcaatatcctttgtcgtaatataaggtaggacgccaagatttagttgattcaacaaacgttccataatgaatagcggcgacgcaacacgactacactgttcaaatgcgcacgcaaaacaaacccttgcaactttatttgccaatcgtaatcacagtagtttttacgagtacgccatcgcgtttgtaagcacattgctttttaaaaataatttaaatttaatgaccgcgtgcaatttgatcaactcgttgatcaactttgaactcaacatgtttggtaaaagtttattgctaaatggatttgttaatttctgcattgctaacagcgacggggttacgattcaacataaaatgttaaccaacgtgttaagttttttgttggaaaaatattattaaaaataaataaataaacttgttcagttctaattattgttttattttttataaaataatacaattttatttatacattaatactttggtatttattaatacaattatttacaatactttatttacactataatactttatttacattagtactaaattaatactaaattacgctaatactaaattaatactttatataatcaaaaataatactttatataatactttctaatcatcataaacgggtaatagttttttctcttgaaatttacgctgcaactcttcgctaaaacacatgggcggtggagtgggagcgggtggagtaggagtccttacgggtttgatgggcgacagttctctggacttgcggaacagcttgggcgaaaacgtcggcgtgcgccgactaatgatttcttcatcgcacgaggcgtcgcacattgtgcacgcgtccggtgaggtacacaaaactttcttgggcacgctgtacaccggcttgggcacgctatatgtgttgccaaaactagaactcgttgtggttgccgaacggagacgatgggtgtgaagacggcgatggctgtgaagacaagtccgaaggcgcgataaaagatgaaagtgtttctgaaaccgaagtggtggtagaagtggtagaaggcgggtgcgttacggcaaccacgctgctgctatttctgccttcggagaccacttccagcaatctagagttactctctcgttcttcgcggcgatagtcaatgtcgcaataatgttcataagatgccttttcggcttcggcgcgccttttcatgtatatgttgtgacgcatctcctttaactgcacgtacaaattccagcattgcacagccagtatcgtaagcacgcccattatgattacgggataattttgattaaacacggtcggctcgtgatcgcttacaatcgctcggcacatgatgcattttttgtaaatgttcacatacacacagttttggctcaaggtttcggtatttgcgtagtcaatttccagatacacgatagagttccagcacattgattccaaatcgtagtgacgatataaaacatctagcgccggtagatgaccatttttgaacacgtagatttgaaacgcggcaaacagcatccaacacagcccagtgatcacgtttaccataatacacgtgatagcgacgtaaaagttttctttcgcattgaaatttacatttgtgtttgaagagctgctgcgatttttcgtccacacgataatcttccatataaaataaaacatgtaaaataatatccacatgccgaacgccagcattatcggtatagatagattgataaccgattgctttccttcaatttccagcaaaaacgcgtatctgctgtctatcactcccattatagataacacaaacactatcagatatgctaataataatgaggcattaagcccgaattgtaaaactgcagtgattttatttaacattttgaatatttaattcaacaactaagtaatggcaatatgtatcgagtactgatcgtgtttttcctgttcgtgtttctttatatagtgtaccagcccttttatcaggcatacttgcatatcggacatgcccaacaagattacaatgacacgttggacgataggatggattacattgaatccgtaatgcgtagaaggcactacgtgccgattgaagcgttgcccgcaatcaggtttgatactaatctcggcacgttggccggtgacacgattaaatgcatgtcggtgcctttgtttgttagtgacattgacctgccgatgtttgattgtagtcagatatgcgataacccgtctgcggcgtatttctttgtcaacgaaacggatgtgtttgtggtcaacggccacagactgacggtgggcggatactgctccactaatagtttgccccgcaactgtaatcgcgagacgagcgtcattttaatgagtctcaatcagtggacgtgcatagccgaggacccgcgttactatgcgggcacagataacatgacgcaactcgcaggcagacaacactttgaccgcattatgcccggacagagtgataggaacgtcctgtttgaccgattactaggccgagaggtgaacgtgaccactaacacgtttcgccgcagctgggacgagttgctggaggacggcactaggcggttcgaaatgcgctgcaacgcccgagataacaacaataatctcatgtttgttaatccgcttaatcccctcgagtgtctcccgaacgtgtgcactaacgttagcaacgtgcacaccagtgttagacccgtatttgaaacgggagagtgtgactgcggcgacgaagcggtcacgcgtgttacgcacattgtgccgggggacaggacctctatgtgtgccagcattatagatggcctggataaaagtacggcatcatatagatatcgcgtagagtgcgttaatctgtacacctctattctaaattattctaataacaaattgttatgtcccagtgacacttttgatagtaacacggacgcagcttttgcctttgaagtgcccggctcctaccctttatcgcgcaacggcatcaacgagccaacttatcgcttttatcttgataccagatctcgagttaattacaatgacgtcagagggcagttatcttaattgtgataacacaaacaataagtcatttaaatgttacgtcagtagttagtatataagccgtacatgttggcttgcaaattcagtcaatatcaggcttttatcatggacggtgtaaagctgctagggacgtgcgcgctaataattttgttatcgacgacgagtacagttgtcgggcgtgaccgtatcacgtttacgccgatagaagatagcgcaggcctcatgtttgaacgcatgtacggcttgcgacatcatacagacgacagatttgtgtttgtgaaaaaattcaattttgtttcggtgctgcaagagctcaataatatcaaatctaaaattgaattatatgaagcgcaagtttcaacttgcacaaacgtcagacaaataaaacagaacagatcgagtatcatcaaagctcgcattgaaaatcagctgcagtttttgacgcaactaaacaaaaatctcatcacatactctgtggaaagcagcattttaagcaacgacgtgctggacaacatcgatctggaatatgacgacagcggtgagtttgacgtttacgacgaatacgaacagccttcgcattggagcaacatgactgtatccgacgcgcaagctttgctccgaaacccgcccaaagacagagtaatgtttttggacacggttaccaccagcgacgtgagcagcaaatacgaagaatacataaactgcattgtgagcaaccgtaccgttgaaaacgagtgcatgtttttagccaacatgatgaacgtgctcaacgacaaattggacgacgcagcagctttggccaagatgctggagcgaatagtaaaacaaacgcgaaagaacaaactcaacatctccaacacggttatagacgacgacacgctgctaacggaaatgaaaaaattaacacaaactttatacaaccaaaaccgcgtgtgggtagtggattttaacaaggacatgaatagttatttcgatttgtcgcaagcgtataaattgcatttatatgttgatttaaacacggtcattatgtttattaccatgccattgttaaaatccaccgccgtttcgtttaatttgtatcgcgtcatgacggtgcctttttgcaggggcaaaatgtgtctgcttatcatttcgggcaatgaatactttgggattacagacagcaaaaactattatgtgcccgtatctgataactttagacaagattgccaagagtttacgggctacaatgagtttttgtgtcccgaaactgagccgattgccactatgaactcgaaagtgtgcgagattgaaatgtttatgggtcgatatagcgacgacgtggacaacatgtgcgacattagggtggccaattataatcccaaaaaagcttacgtgaacactttaatagactaccgaaaatggttgtacatttttccaaacacgaccgtgtccgtccactattattgtcacgacgcgcttgtagaagttgatacaaaagtttcgcccggcgttggtgttatgttttcgactatggcgcaaacgtgttcgattagaataacgtatgatgtgaccataactgtagattcgcgattttatgtcagccattcaactacatactggcctaaaaagaaatttaattttaacaactacatcgaccaaatgttgcttgaaaaagcgaccaccagttttataccgactgttgacaattttacccggcccgttttattgcaacttcctcataaatttcacattaaagattacacatcgacgccccatcattttttccatcagtctaaaatttacaccaacagcgcggcgcccgacgaagactcgcaagacgacagtaataccaccgtggttattatcgctattgtcgctgcaatgatcctattctgtggattattgttatttttgttttgctgtataaaaaaacggtgtcatcaatcaaataacgtggttgtgcaatacaaaaataacaatgaatttgtcacaatttgcaataatttagaagacaatcgagcatacattaatttacctaatgaatacgatagcgatgatatgccaaaaccattgtaccctttacttggctttaatgatgatttgttaaaagatgataaacctgtgttgtaccctatgattatagaaagaataaaataaaacatgtataattgaaataaatatattatttaataaaatgttttttatttatatactattttctattacatattccaatgcacacaaatgtttaatggctatcagttttaattttactaattcgtctaaacaaaaattattcacttgctgtttttcatccatttgacatatggcgtttataaataattcgctgtgttttatgaacgaatcgtaaaccgctgcctgggccttcagcacggtcggcgcattgtatttttgggtaaagtacgcaatatttttagtcaaacacagagattttaaatctttttcatttatatccaagtcggaacaatcgtatacaaaatctagcttttcactttcgggcgcgcccagatactggtttacgagttcgagctgctccacttggcctttgatatcggccgctatgcacaacattttgtcgattgcagtttcattgtttttaacataataatttttaacttttttattttgcaatttaatcaaactatttaaattcgcttgacctttcttacaaagcgcagttaatatgcaagacattttgacttataataaaaaacaaaacttttatatattcatttattgttcaataataacaaatattccaggcttaaaagctaacgaatagggcttttcggtaattttcttattattcatgtccgtcatctgcatctctttgccgtacttgacgccgtcaatggtgcccatcatgtacattttaatctcctccgaaggtccgtctattttgtccatttcgaacaatctatcaaaatcttcaacgctcattctctgcatatcaagaggaacgtttctgatctttccggtggcgtaaattgatccgttgttgtcacggttgattatgtaaaaccgacgaatcaacatgtcgcgctcgctagttttgttcttatccggcaaatgaatgcacacgtttggttccatcttcaaaggaaaatcgctttgcaagtgtttttgcaaaatgttgccaaatatattgttgtgtttgtgaatgtctccgtattgaatgctaaaaaactggccaaagttgcttttggcacgttttatggttccaaagtcggaaaaccaaaatccgcagggcttgccctgcactcttggaccgatggtgtacgtagtcttgccgttggccggctccaacaccacgatatttttatcgggctcgggatacaacttgtcttcccattcgtgcaaactgttcaaattagacagtcgacaaaattcgtttttcaaaaatctgccttcgaaacaactacaattcagtattgaaaagttgcctcgtttcacattaatcgccatctgctcctgccacaacatcttcgtcaactcgtgtggctccaattgaatggacgacggcgtaaaatagcacattacgcccgtttcgtcgtgtttcacgttaaaagcgccgctgttgtacggcaccagctgctggtcctcaccaccttccgatctttcccgcttcggctggttgtcgtcgctgctcgaatatccatcgccaatcttgcgtttagttgccatgctaccgacgtgcgctgtctgctgtggttcaagtctaattgaagtgtttcacagaatataagatatataataaatatggacgactctgttgccagcatgtgcgtagacaacgcgtttgcgtacactactgacgatttattgaaaaatattccttttagtcattccaaatgcgcccctttcaagctacaaaattacaccgttttgaagcggttgagcaacgggtttatcgacaagtatgtggacgtgtgctctatcagcgagttgcaaaagtttaattttaagatagatcggctaaccaactacatatcaaacattttcgagtacgagtttgtagttttagaacacgatttgtccacagtgcacgtcattaacgccgaaacaaaaaccaaactgggccatataaacgtgtcgctaaaccaaaacgacgcaaacgtgctcattttgaccgtaactttaacgagctaaaatgaacgaggacacgcccccgttttattttatcagcgtgtgtgacaactttcgcgacaacaccgccgaacacgtattcgacatgttaatagaaagacatagttcgtttgaaaattatcccattgaaaacacggcgtttattaacagcttgatcgttaacgggtttaaatacaatcaagttgacgatcacgttgtgtgcgagtattgcgaagcagaaataaaaaattggtccgaagacgagtgtattgaatatgcacacgtaaccttgtcgccgtattgcgcgtatgctaacaagatcgccgagcgtgaatcgtttggcgacaacattaccatcaacgctgtactagtgaaagaaggcaaacccaagtgtgtgtacagatgcatgtccaatttacagtcgcgtatggatacgtttgttaacttttggcctgccgcattgcgtgacatgattacaaacattgcggaagcgggacttttttacacgggtcgcggagacgaaactgtgtgtttcttttgcgactgttgcgtacgtgattggcatactaatgaagacacctggcagcgacacgccgccgaaaacccgcaatgttattttgtattgtcggtgaaaggtaaagaattttgtcaaaactcaattactgtcactcacgttgataaacgtgacgacgacaatttaaacgaaaacgccgacgacattgaggaaaaatatgaatgcaaagtctgtctcgaacgccaacgcgacgccgtgcttatgccgtgtcggcatttttgcgtttgcgttcagtgttattttggattagatcaaaagtgtccgacgtgtcgtcaggacgtcaccgattttataaaaatatttgtggtgtaataaaatggtgttcaacgtgtactacaacggctattatgtggaaaaaaaattctccaaggagtttttaattcatattgcgcctgatttgaaaaacagcgtcgactggaacggcagcacgcgcaaacagctgcgcgttctagacaagcgcgcctacaggcaggtgttgcactgcaacggcagatactactggcccgatggcacaaagtttgtctctcatccgtacaacaaatctattcgcacgcacagcgcaacagtcaaacggaccgacagctcgcatcgattaaaaagccacgtggtcgacaaacgaccgcgccgctctttagattctcctcgcttggacggatatgttttggcatcgtcgcccataccacacagcgactggaatgaagaactaaagctgtacgcccagagccacggctacgacgactacgacgacaatttagaagatggcgaaatcgacgaacgtgactctttaaaaagtttaaataatcatctagacgacttgaatgtattagaaaaacaataaaacatgtattaaaaataataataataaaactatattttgtaatatataatgtattttatttaaaaattgtctattccgtagttgagaaagttttgtcttgacttcataactctcttctccatattctgcagctcgtttacgttttttgtgacgcttttaattttctcaaaatgctggctgtcaatagttattttttgcttttgtctattaatttcttccaattgagattttaaatctcgctgagattgagatgcgttgtaattccttgagaacatcttgagaaaacatacagatgaggtaaaacagcatcttttatccaaattaggagttaattattattcatttgtatcgcgaccatttgctcgtacacatcttccataaaatggttatttttattgcgataagtgttggcattgacattttgcaaatgtcgtaggttaaaggggcaaatgggctgcgtggccgataaaagattccagttcaacaatccctcttcgcccccgtttaacttgaaaatggcgctacacgtttctacgctatcgtgttcctgttgagtggcgcacggttcgaccagtatcatcttgtgatatgcggttttgacattcatgtgcaacggaataacttgcgggtcatcgcattcgtcggaattaagctttaaatggcgtccgtatgctttccaaagtttttcgtcgtcgaaccgcggcactgcttgcaagtcgacgcggggaaacggcgctctgtacaaaacgcctaaattcaaaaactgattgcattgttgcagctctgtccaatcgacgcgatttttgtaattttgaaacagcatcaggttgaacgccgcgctggcgcgcacgtttgtaatcactgtgtaattgatcagcttgtgccaatactgggcattgaaattttcttcaaactcatttctaaactctggatgcgcaaacatgtgtctaatgtagtacgcgggcggggcgttgaacgcagtccatttgtcaatacacttccagtctgaatgtaacgtgttcaccaaaccgggatattcgtcaaacacgagcatgtgatccgaccacggtatgctgtgggcgatcaattttagttcttgcacgcggccttcgcgtaagcaatacaaaatgagcgcgtcgctgatcttgacacagtcttgcatgtacgcggacaaattaacgttttccatacagctcacattgtttattagcgccgtgttcaagtgtttgtatttggacacataatcgtagttgatgtactgtttaatgggttcttgaaaccattcttttagtagtatgtgactggccactatgcgtttccaatttaatttgtgtgcgtatttttgctgcaccgacaacgagaggttattgtaatttttggatatttcttccatgtccaacaagtccccaaacgcgagtataaaatcttgcgtcaaaaatttttgctcagacaccaacgaccagatcaaatgtgatttaaacctgttggcgattgttatcgacaacggcgaaattgaaataattttccaatccaacttgttgcgaaacacgtgaataaaatcgacgcgtccgtaacattcgcgcgatatgcgcttccaaaacgtgtcatcttgcaaattaagcaaatagacacgattgttgggagatttgacggccaattcaattatttttatatattctttttgctttaaagcgcgttgtagcacttgggttggagccatgtcgactgaagctccacgctgtttgaagcaaggtgaccgttttggtcggcatgttcaaacgtcgattacatgtttgctttgcatcaaaatggcgtaattaattaagaaacaacatgaaagccatctgcatcattagcggcgatgttcatggaaaaatttattttcaacaagaatcagcgaatcaaccgcttaaaattagcggctatttgttaaatttgcctcgaggtttgcacggctttcacgtgcacgaatatggcgacacgagcaacggttgcacgtcggccggtgagcactttaatcccaccaatgaggaccacggcgctcccgatgctgaaattaggcatgttggcgacttgggcaacataaaatcggctggctacaattcactgaccgaagtaaacatgatggacaacgttatgtctctatatggcccgcataatattatcggaagaagtttggtcgtgcacacggacaaagacgatttgggccttaccgatcatccgttgagcaaaacaaccggcaattctggcggccgtttgggatgcggaataattgccatatgtaaatgatgtcatcgttctaactcgctttacgagtagaattctacgtgtaaaacataatcaagagatgatgtcatttgtttttcaaaactgaactcaagaaatgatgtcatttgtttttcaaaactgaactggctttacgagtagaattctacttgtaacgcatgatcaagggatgatgtcatttgtttttcaaaaccgaactcgctttacgagtagaattctacttgtaaaacataatcgaaagatgatgtcatttgttttttaaaattgaactggctttacgagtagaattctacttgtaaaacacaatcgagagatgatgtcatattttgcacacggctctaattaaactcgctttacgagtaaaattctacttgtaacgcatgatcaagggatgatgtattggatgagtcatttgtttttcaaaactaaactcgctttacgagtagaattctacttgtaacgcacgcccaagggatgatgtcatttatttgtgcaaagctgatgtcatcttttgcacacgattataaacacaatcaaataatgactcatttgtttttcaaaactgaactcgctttacgagtagaattctacttgtaaaacacaatcaagcgatgatgtcattttaaaaatgatgtcatttgtttttcaaaactaaactcgctttacgagtagaattctacgtgtaaaacacaatcaagggatgatgtcatttactaaaataaaataattatttaaataaaaatgtttttattgtaaaatacacattgattacacgtgacatttacgatggcgaacaataatttcactttttatattaggacacgacgtgtatataggaaagcttaagcgtttcaataaagccatggcgtacacgctaagcttgcccagcttgcggctctttgaaatctgtagttttcggggagtaccgtcgttcttcagtgccacatacgtcaacttgcgatcgtacactttataatacgtgttgtagttatttttttccagaaattccctcataaagcaatccttggataaagtttttgatccgtacagttggccacaccggtccatgcacaggtacacacacgtgatggcgttttgaatgacgatgcgatttctgtcaacggcaacgcgcttgaatatggtgtcgacgttgtccgattcaatggttccgtaaacagctccgtctggatttactgccaaaaactgccggttaataaacagctggccgggaatagacgtgcccgtgatgtgtgtcagcagagctgagcagtcagccatagaggctagagctacaagtgccagcaagcgatacatgatgaactttaagtccccacagcaaactggcgcttttatataaaaatttgggccatttttggcgattagataatttttgaagattagataatattgagattagttaataatttgtgtgattagataactttttagggtattgcgcattataaatcaaggtcgagttgtataaactgctctggcgtgtaaaactgcagacttaagttttttgcaaacactcggtctgaatcgctaaaatctttctgaccggtggttagattaattcggccagccgcgtcgcccacataaaaagattgttccttgtcaatatgcgtaaactgtttggccatctcgcgccacattcccgtgtcgggctttcgatgctcatccttgttgggcgacacataaaacgatatgggcacgccagtagcttttttaatattctctaatttatataataaatcgctcgctttgattttgccggaacctaaatgggcttggttcgtaaaaacaactaaatcgtagcctaattcgtacaaacgctttagcttgtgtgcgcacggaaggagctgccagtcgtctgggttttttggaaatttggaccgtgtctttgagctaattagcgtgccgtccaaatcaaaagccgcaattttggttcttttagcgccgtcatgaaccgcgtacgcatacaaatcgggctgctgtaacgtccacatggtgaatgcatcttactcaaagtccatcaattcgtacgcgtttgtgtccaggtcgggcgttgaaaaattgtagcttgccattagatcggatagcgattcaaattttgtaagcgtttgtagcgcacgtttggcatcttgtttaaaattacacgacgacagacagtaaaaatattcctcgataagcatgactacacccatatcactgtttaagtgctcgacgtagttgttgcatgttatgtcgcgtgtgccgcgatacgcgtgatttcggtgaaaatcacaccacaaccagtcggcgtgcgtgtaacaaagtcgacagcgaaacaatttatcgttttccaaaaaatttaaatactcgacagttttgcagcttagattccgcgtttgattcaccttaaaatcgtcgtcagcctctataatctcgggcaacagcttgccttgttgccccatcgtatcgatcacctcccccaagtggcccggtgttatattaagtcgtttaaaatcatttattgcttcctgcacgtcggcctggtaatttttgaccacgggcgtggaaatcaattgccgttgaagggaaataattcgtggtgtgggtatcggccgcctgttgcacaattccaccagcggtggaggcaagggcgcattcacagcaaccgttgtcatttataagtaatagtgtaaaaatgcaaatattcatcaaaacattgacgggcaaaaccattaccgccgaaacggaacccgcagagacggtggccgatcttaagcaaaaaattgccgataaagaaggtgtgcccgtagatcaacaaagacttatctttgcgggcaaacaactggaagattccaaaactatggccgattacaatattcagaaggaatctactcttcacatggtgttacgattacgaggagggtattaataataacaataataaaaaccattaaatatacataaaagttttttatttaatctgacatatttgtatcttgtgtattatcgctaaccattaaaagtgctggagccacagtgttgcggcgagtctttatagaagatcgttgtttggctggaactgagcttttccttttcctgctgccgctaatgggagtgggcacgtactctgtagtagacggtgcaacgggcaacttgagcgctaccgtcttaaatttggccatacttttagtgatgaaatcgcgcgttaacacttcgtcgtaaatgttacttagcagaggcgcaacattgtgattaaatgtctcgtttaacaagctgtaaaactccgaataaagcttatcgcgcatttcgcagctctccttcaattctgccaaatttgcgttggtaagcaccacagtctgtctttttttgctcgctggaattgctgcgttctcgcttgaagacgacgatgtcgatcggtcggccatttttttgcccagcttttcagtgtgatcaaaaatgaacacaaaatctgccaattcgggcttgtttttcaccaaatcccacatggccgggctactaggccactcgggctgcttgatcttagtgtaccaactgttaaacaaaatgtatttattgttgttaatcactttcttcttgcgtttggacattttgcgttcgtcttgcatgacaggcaccacgttaaggatatagttaatgttctttctttccaagaaatttacaataacggccagctggtccatgttggatttgttgtaagagctcgattccagtttattcaacagcttttcatttttgcacacggccgcagtctccggagattgttgctccggcacgtttaccatgtttgcttcttgtaaacctttgaaacaacccgtttgtattcttgatgatatatttttttaatgcccaacaacctggcaattcgtttgtgatgaagacacaccttacgcttcgaacatttgtcggtgattactgtgaaatggcctaaattagctcttatatattcttttatacgctcaaacgacacgatgtccaacatgtgcgcgcagacgttttctgtgttcatcgtgtgcttgagcgtgttgatggcttccctgaacagcgcttgtatttcgctgcgagtcaagcagtccgaatcacacccgcctaagtgcgtgcaatttttggggggcatcgttgtctatctttttcagagtggcgtagaaaaagtcctgcaattgcctattatcaaaacgcgccttgacgctgcgcacaaaatcaaaaaattcaatgtaattgctgtaatcgtacgtgatcagttgtttgtcgttcatataattaaagtatttgttgagcggcacgatggccaggctgcgcgctatttcgcaattgaagcgtcgcggttttaacattatacggtagtcattgccaaacgtgcccggcaacaacttcacggtgtacgtgttgggtttggcgttcacgttaatcaagttgccgcgcacgacgcctacgtatatcaaatacttgtaggtgacgccgtcatctttccattgtaacgtaaatggcaacttgtagatgaacgcgctgtcaaaaaaccggccagtttcttccacaaactcgcgcacggctgtctcgtaaacttttgcgtcgcaacaatcgcgatgacctcgtggtatggaaattttttctaaaaaagtgtcgttcatgtcggcggcgggcgcgttcgcgctccggtacgcgcgacgggcacacagcaggacagccttgtccggctcgattatcataaacaatcctgcagcgtttcgcattttacatatttgacacttaaaaaattgcgcacacgagcaccatcgtttgatacctaattgcaactatttacaatttatcagtttacgttgaacccgttttaattttttagatccgtccttgttcagttgcaagttgactaaatgacaaaatttttcggttctgcaaaaccgcccttgtctgttccacccgttgtatttgaaaaaactttttttcacgcggcgacaactgcttgtataatattgcccaatgtaaacatgcaaaattttgttactctcgtcaaaacagcggttggcgttccattccataatttttttattatttatcaacgatggccattgtaaattgtcgtcatttatacgcatcatatgatttaacaaaagcttttcgtatagcggaacttcaattcccttggaacatttttcaaacgataatttaatttgtttctcggttggcagcatttcatgcttgattaacaatcgcctgacttttatagccacgtttatgtctttgcacagcaaatgtgggttgtcgacaatgtaatagtgcaaagcatttgttacggcaaatgcgtagtttgatttgacgacgccctttttcttgacgggcattgcggcttttaaaattacttgcaagcattgtacgaatacctctttgtgtttaaacaataatatggacaaacatcggcgaaacaatttgtaataattatgaaatcccaaattgcaggttttaaacttctttgttacttgttttataataaataaaatttgctgacccatgtctgcgcccacaactttaattaaccatttgtgcgcatattgattgtctcgttgttcccaaccggaaaattgattgatctcgagccaccggcattggtcgtttgataccgtcgttaacgccgacgctcctgcctgtttgattacgggttctaaaagacgaaacagcagcgtaaatttgtttttgcgtcggtagtattttggcaggcaataatcaaaaaaatccgtaagcaattctctgcatctattaatattcgttgcgtacgaatcgagtttttcaaaaattactttgtttgtatgaaaataacgtttgggcttctcacaataataatcttcgttgtagaacagaaacggtttgcgagaattggcacgtttgtccatgattggctcagtgtaacgattgattcaaatcaaaattgacaacacgtttgccgtaatgtgcaccggttcgcacacgtttgccgcgtatgtaatccatgtttatttcgctgtcgcaattgattacacgattgtgttgggcggcgcgttttattgaatttaggcgacgcgtcgacaactccaaaggattgtaaagcgcagatttttccagagtaaacgagtttaagtggccaccgttgaaccattccagagccacgattgtgtacagcaaaaagaatatttctttgtcgacgttttcaaacgcaaacttgttttttaggcaatagtagtaaaattttaacgaattgtataaataaaacataaaattgccatttttaaagtaaaattctacatccgtgacgaacaaaaggtttactattttgttctccaacaagtgtgccaattttcttaagtacaccattgaatttttgtcgtcgtccatctcgatcaacaacacgtacggcgttttggaatttaaaattattctaaaattttcctgttgcaacgattccacagcgtccgaccaatatgacgctgccacctctagacagatgtatttcttggaaaacacgtgtcgtttgataacctcgctgatggacgtgatcgattgtaaatacttttcaaacgtcgcgtcttcccaaccacgcaccgaaacgggcgctgtcgtgtcgggctgatgtttgaaatccaaaccactctgaattaacttggttgtgattcgtatgctcaactgttgacccaacgtgtagtgatcttcgtaggcgcgctcccacatcacgttacacacaaatttgacgagatcatcaacgtctttctgttgcaaaattcgccgcaaacgcgccacatcgcccttgtaccaccgatctcggcacacaagctgtagcatttttaaatcgtgatcgctcaagctattaattctggttagatttatatagtcgtcaatatcctcgggcgtggtttgcgtcatgtctgtaaaacgtgcaaaatcaaacatttttatgttgtagtcgaatctaacaaatccatcggcgttcacttgcacttcgcgctttacaaaacgaggtagcgtgtaatcgaacccgtttaaatagattgcgtacaaaaccagcacttcatcttccagtttgcacgcttgcggcaaaaattgtgtggtgtgctccaaccgggtgacaaacatgactatggaaaataacgcggaattcaacagacgactagagtacgtgggcacgatcgccacaatgatgaaacgaacattgaacgttttacgacagcagggctattgcacgcaacaggatgcggattctttgtgcgtgtcagacgacacggcggcctggttatgcggccgtttgccgacctgcaattttgtatcgttccgcgtgcacatcgaccagtttgagcatccaaatccggcgttggaatattttaaatttgaagaaagtctggcgcaacgccaacacgtgggcccgcgttacacgtacatgaattacacgctttttaaaaacgtcgtggccctcaaattggtcgtgtacacgcgcacgctacaagctaacatgtacgcggacgggttgccgtattttgtgcaaaatttttcagaaacaagctacaaacatgttcgtgtgtatgttagaaaacttggtgcgatacaagtagcgacattatcagtttacgaacaaattattgaagatacaataaatgaactcgtcgtcaatcacgttgattagataatgtccgtgttaaatgtgatatcttagattacgagcgcgcaataaccatagtttaatcgaagagaatagccgtcgccacaatggataattacaaattgcaattgcaagaattttttgaccaagcgcccgacaacgacgatcccaactttgaacatcaaacgcccaatctattggcgcatcagaaaaaaggcatacagtggatgattaacagagaaaaaaacggccggcccaacggcggcgtgcttgccgacgacatgggactcggcaaaacgctctctgtgctaatgttaatcgcaaaaaacaactctctacaattgaaaactctaatagtgtgtcctttgtctttaatcaatcattgggtaaccgaaaacaagaagcatgatttaaattttaacattttaaagtattacaaatctttggatgccgacacggttgagcattaccacattgtggtgaccacgtacgacgttttattggcacatttcaaattgatcaaacaaaataaacagtcaagtctgttttcaacccgctggcatcgagttgttctagatgaagcgcatattatcaaaaactgcaagacgggcgtgcacaacgccgcgtgcgctttgaccgcaacaaaccgatggtgcattaccggcacaccgatccacaacaagcattgggacatgtactcgatgattaattttttgcaatgtcgtccttttaacaatccaagagtgtggaaaatgttaaataaaaacaacgactctacaaatcgcataaaaagtattattaaaaaaattgttttaaaacgcgacaaatctgaaatttcttctaacattcctaaacacacggttgagtatgtacatgttaattttaatgaagaagaaaaaacgttgtacgataaattaaagtgtgaatcggaagaggcgtatgtgaaggctgtggcagcgcgtgaaaacgaaaacgcactaagccgattgcagcaaatgcagcacgtgttatggctaatactgaaattgaggcaaatctgctgccacccgtatttggccatgcacggtaaaaatattttggaaacaaacgactgttttaaaatggattatatgagcagcaagtgcaaacgagtgctcgacttggtagacgacattttgaacacaagcaacgacaagataatattggtttcgcaatgggtggaatatttaaaaatatttgaaaacttttttaaacaaaaaaacattgctacgttaatgtacacgggccaattaaaagtggaagacaggattttggccgagacgacattcaatgatgctgccaatactcaacatcgaattttgctgctttccattaagtgcggcggcgtcgggttaaacttaataggcggaaaccacattgtaatgttggagcctcattggaacccgcaaattgaattgcaggcgcaagaccgaatcagtcgtatgggacaaacaaaaaacacgtacgtgtacaagatgctaaatgtggaagacaacagcatcgaaaaatacattaaacaacgccaagacaaaaagattgcgtttgtcaacacggtctttgaagagactctgctcaattacgaagacattaaaaaatttttcaacttgtagctggtaagtcgtcatgaacacccgatatgctacttgctatgtttgcgacgagttggtgtacttgtttaagaaaacgtttagtaacatgtccccttcggccgctgcgttttaccaacggcgcatggccattgttaaaaacggtatcgtgctgtgcccacgttgttcgtcggaactaaaaattggcaacggcgtttcgattccaatttacccccaccgcgctcaacaacatgcacgacggtcgcgttaagacgcaagcgcttcgagttttggcccgctcgctacctccgctgtacgactcgaccgtcgatcgacacggctgcaaggtgttcacggtgcggcgctacaacagacgcgtaatcgactttgcgggcattcgcaacaaaacgctggaaatcattaaaacggatagaaacttgccgctcaacacagaatgcaatgtgaaagttgtcgacagtgcatgcatgcgttgcagaaaaagtttcgcagtttaccccgccgttacctatctgcattgcggacattcgtgtctgtgcaccgactgcgacgaaacggtaaacgtggacaacacgtgtcctaaatgtaaaagcggcattagatataaattaaaatacaaaactttgtaacatgttgccctacgaaatggtgattgccgtgttggtttacttgtcgccggcgcagattctaaatttaaaccttccttttgcataccaaaaaagtgtgctgtttgccagcaactctgcaaaagttaacgaacgcatcaggcggcgagcgcgtgacgacaacgacgacgacccctatttttactacaaacagttcataaagattaattttttaactaaaaaaataataaatgtttataataaaactgaaaagtgtattagagcgacgtttgatggtcggtatgtggttacacgcgacgttttaatgtgctttgtaaacaagagttatatgaagcaattgctgcgcgaggttgacactcgcattacactacagcaacttgttaaaatgtatagtccagaatttggtttttatgtaaatagcaaaattatgtttgtgttaactgaatcggtgttggcgtctatttgtttaaaacactcgttcggcaaatgcgagtggttggacaaaaatataaaaactgtgtgtttacaattaagaaaaatttgtattaataataagcaacattcgacatgtctatcgtattgattattgtcatagttgtaatatttttaatatgttttttgtacctatcaaatagcaataataaaaatgatgccaataaaaacaatgcttttattgatctcaatcccttgccgctcaatgctacaaccgctactactaccactgccgttgctaccaccactaccaacaacaacaacagcatagtggcctttcggcaaaacaacattcaagaactacaaaactttgaacgatggttcaaaaataatctctcatattcgtttagccaaaaagctgaaaaggtggtaaatcccaatagaaattggaacgacaacacggtatttgacaatttgagtccgtggacaagcgttccggactttggtaccgtgtgccacacgctcatagggtattgcgtacgctacaacaacaccagcgacacgttataccagaaccctgaattggcttacaatctcattaacgggctgcgcatcatttgcagcaaactgcccgatccgccgccgcaccaacaagcgccctggggcccggtcgccgattggtaccatttcacaatcacaatgcccgaggtgtttatgaacattaccattgtgctaaacgaaacgcagcattacgacgaagctgcgtccctcacgcgttactggctcggcttgtatctgcccacggccgtcaactcgatgggctggcaccggacggcaggcaactcaatgcgcatgggtgtgccctacacgtacagtcaaatcttgcgcggatattcattggcgcaaattaggcaagagcagggaatacaagaaatcctaaacacgatcgcgtttccgtacgtgactcaaggcaacggcttgcacgtcgattcgatatacatcgatcacattgacgtgcgcgcttacggctatttgataaattcatactttacgtttgcctattacacgtactattttggagacgaggtaatcaacacggtgggtttgacgagagccatcgaaaacgtgggcagtcccgagggagttgtggtgccaggcgtcatgtctcgaaacggcacgttgtactctaacgtgataggcaactttattacgtatccgttggccgtccattcggccgattactccaaagtgttgaccaaactttcaaaaacatattacggttcggttgtgggcgtaacgaataggttggcttactacgaatccgatcccacaaacaacattcaagcgcccctgtggaccatggcgcggcgcatttggaatcggcgcggcagaattatcaactataatgccaacacggtgtcgtttgagtcgggtattattttgcaaagtttgaacggaatcatgcgcatcccgtcgggcaccacgtccacgcagtcgttcagaccgaccattggccaaacggctatagccaaaaccgacacggccggcgccattttggtgtacgccaagtttgcggaaatgaacaatttgcaatttaaatcgtgcacgttgttctacgatcacggcatgttccagctatattacaacattggcgtggaaccaaactcgctcaacaacacaaacgggcgggtgattgtgctaagcagagacacgtcggtcaacaccaacgatttgtcatttgaagcgcaaagaattaacaacaacaactcgtcggaaggcaccacgttcaacggtgtggtctgtcatcgcgttcctatcacaaacatcaacgtgccttctctgaccgttcgaagtcccaattctagcgtcgaactagtcgagcagataattagttttcaaacaatgtacacggccacggcttcggcctgttacaaattaaacgtcgaaggtcattcggattccctgagagcttttagagttaattccgacgaaaacatttatgtaaacgtgggcaacggcgttaaagccctgtttaattatccctgggtaatggtcaaagaaaataacaaagtgtctttcatgtcggctaacgaagacactactataccatttagcgttataatgaattccttcacctctatcggcgaaccagctttgcaatactctccatcaaattgctttgtgtatggaaacggtttcaaattgaacaacagcacgtttgatttacaatttatttttgaaattgtgtaattatatttagggagaatgtgatattcaaaagactgactgttaacacaaaagactgatattgttgttgttacaaaatagataataaaacaaaaaataaattaaatattatttatttattaaactgtttaattttaatgctaacgcgtacaaatcacgctgttccgacgtggacatggaattgcgcagaaaagtcttgatagtgtcgatttcttcgccgtcatccacttccatatatttgatttcttcctcgatttgcatttccaagtttgcgtattcttgcaaataataatctagtcgttgggcgacctcgccaattttaaataatacattatccgacaccaaatgccagcgagtgactgtgcgctccatcatcctggcactttttaatgtgaatattaaaaggttgttgcatatatatcgttaaacgtttatgtttactttcacgttagctcgtttcattgatgtaaacatttagttttataacagcgtcggtaattttattttttaaagtaaacagaccaaaatcaaaggtgtcttcgacaggtacgattattttcccattgacactgttttcgtgcacagatataattttatcaccgtttattattttgcccaaacacacgtactcgtttcttctcaagccaactatttctaaacaattcacttttctattatcgtgtacgcaattaaaagtaaacgaagcgctacaattgtcgtattctattacaattctgcggcatttataaaatttattaatgttgacgcaaattccatgcagcgcatccatttcgtactgcaaatgcggcgcaattaaaaaatttcctcgtcgttgttaacaatcttgggcgctaaaaagcacgccaacacgcccacgtctttaatgcaatattccaatttgaacggcagttcctcggacatgtatattgtcacggtgggcgccaaaggagcggctttagcaaaatgacacaagtaatcgcccgcaaaagtgtgcgttacggtttgctttgctttgagaacggaaaagttttcgttgtccgcgctcatctgcacgtccgccgagccaatgtcgccatttgctctaaactgcagacccttcttggaacacgacacaataatatcgtggtcgaattgcgtcatgtctttgcacacctgcgcaaactcgacgctcgacatgtggacgacgcaatcgtaatcgctatccggaattcccaaatgttccacgtcgatgcacatcaacttgagcgtgtacgtgcagattctattgtcgttgttgaacacgaacgccatcacatcgccctgatcttccgctttcatcagtacagagctgcgctcgttaacgcatttgacaattttacttaaactgtttatggacacgttgagcggcacgttgcggtcacatctatattttttgaaaccctcggcgtgtagttgcaacgacacgagcgcgacatgcgaggtgtccataacctgcatgcttacgcctcgattatcacaatcaaaagtagcgtgcggcagcagatccttaaaagtttccaccagcctcttcaaaactgcgccggttttaaattccgcttcgaacatttttagcagtgattctaattgcagctgctctttgatacaactaattttacgacgacgatgcgagcttttattcaaccgagcgtgcatgtttgcaatcgtgcaagcgttatcaatttttcattatcgtattgttgcacatcaacaggctggacaccacgttgaactcgccgcagttttgcggcaagttggacccgccgcgcatccaatgcaaactttccgacattctgttgcctacgaacgattgattctttgtccattgatcgaagcgagtgccttcgactttttcgtgtccagtgtggcttgttttaataaattctttgaaaatattgtcgggtgtattattaaatagcatgtatggtatgttgaagatgggataacgcttggcgtgcgggtcgtcatgatttccaccgcgcaccacatatttgcgctcaattttatcaaaattggactggcgagacaaaaacgagacgggcgacaggcatatttgggcgtgcgtaccatcttcggccatccactcggtcaggtcttcgctgcggttaaacacacctttctgaccgtgaatgccacatatttttattccttccaaatcgttggtggacgtgactatgactattttaagcataacgttgtcgccgttaaccaccatgctggcgtcgagtttttcaattttttgatttttaatttgtctaaagtaaacgtacactttgtaaacgttaaaattgccgttggtgcacgtttcaattttgtaccgtcggccgtcgtacacccaattaatctttgcgttgctcaccaacacaccggccatgtacagcacaagtccgtcgtctagcgcaacgtaatttttgtcgctactattcgtaaactttactaaacacgactgcttggggccgaccacaagcttgcccttcaatttgttcactttgttgttgtataaacaaatgggcagcgcaatgtgcggaatgtacggatcttcggcggtcatgagtttattgtctcgcaccaacgtccacaatttaaacattttattgttgagcaaaatggacttgtttaccgccacagagtagccatttggtaaacccgatacgcaattttcctctttgtactcaaacacgggcatggcattctttagattggttagggacacaatcaatttgggtacgggcgtggtatgaaataaatgtataaaattacgataataatactgctccaacttggacatgagcgatttgacgtcatcgttttctacgatcgtacactgaataatgggattatagtatatagaatgtttatagtggtattcgtagggtgtcaacaatacgttaatgtcggcttcgttgttcacccgcaacttttttttgatgcatatcattccttcgtgatgattaacgtaaagtattctgtctgtaatcttcaattcgatgggcgccatgtttcttttcatagtgtacacgataaacgacgtgtttgattttaaacattttaaatttgtgggtctatcattaaacgcgatcagcaacgagtcgtcttgaacgtcgttgaggtcgtccacgaacgcgaccagattgtgttttagcaaatattgaaatttttgcgcaaccatttcgtagtccacgttgggcaaacatgcgttgcggcaaaggaaaaactttttgcccgccacggtcatttcgccgtgaaaaaaactgccaataaatttcacaaaatcctttttttgcttcaacattttctggcgcatgctgtcgttggtgattcgcgccacctcgttgccgacgcgatattttaacacgggcaacgaaatttcaatattgttattgctgctgttgtcctgttgattgggaaagactttgcgttgcttgctaaaagttttcgatacgcaatatatgagacgcccgttgactatacaatcgacaatctttttcgactctttgttgtacaagacgctttgaattttacgacgcttgttcgccaccgtgtacgcgtcgtcgtcggccgtcttgtcgagaactcgttgatagttttgcaaaattgtcgaagttaataacagttctatcaaataggcgtgcttgtatacaattttgttggccaaactgtctatagaatagtttatgtcgtgattcataataatttttatgtgttccacgagttgttgcttgtgaagcgtgttgtattcgaagagaaaatcgagcggtttccatttgccgctgttggccagatatgtttccagcacagaatttaaatcttccgtcactacgtaatcgctagcgtacacgtctcgagcaaacaggacgtcgtcttgtttgtcgtaaactagttggattgcgcgattgatgtgcttctcttgatccacgttgccgtacaaaaacatgcgtttgcaatgtttggcgtatagcttgtcgtagaaattgtgcaccaaaacgttgttgttcatcattatgttgggaaaactcaaaaatctgccgtccagcataaaagttccgttaatattgttgtttgcgtcgacatcgtccgtttctctaaattgcttgtctaagcgcgtgccgaatataacgggcacacatttatgcattacgcaactgagctgttcattaagagcgcaacacaaataagacttgcgttcttgaatagcgcaaaaaagcatacgttcattgctgtttgtagcgcaatcaaaagtatattttaatttgtatttattttcaattctatcgtacaactcgttgaaatcttgaaccacgtccgtcatcgtgaagcgattactgcgcactaattatgtctaaacgtgttcgtgaacggtcggttgtttcggatgaaacggccaaacgcattcgacaaaacgaacactgtcatgccaaaaatgaatcttttttggggttttgcaacttggaagaaattgattattatcaatgtttaaaaatgcaatacgttccggaccaaaagtttgacaacgattttattttaacagtgtacagaatggccaacgtggtgacgaaacaagttagaccgtataacagtatcgacgaaaagcaccattacaacacggtgcgtaacgtgttgattttaataaaaaatgcgcgtttagtgcttagtaatagtgtcaaaaagcaatactatgacgatgtgttaaaattgaaaaaaaatacagacttggaatcgtacgatccattgattacggtctttttacaaattggcgaatctgtaaatgaagaaatacaaaaactcagaaaagctttggtcaatatttttactaataaacccgacaagtcggatataaacaacccagatgtagtttcgtatcaatttatttttggcagagtacaaaaattgtataacagggcaattaaacaaaaaactaaaactataattgtaaaacgtcctacaactatgaacagaattcaaatagattggaaaactctttccgaagacgaacaaaaaatgactagacaagaaattgccgaaaaaattgtaaagccttgttttgagcaatttggcactatattacacatatacgtatgtcctttaaaacacaaccgaattattgtcgagtatgcaaactcagagtcggtacaaaaagccatgactgtaaatgacgacactcgatttacagttacagagttttccgtggttcagtactacaacgtggccaaaacagaaatggtgaaccagcgaattgacataataagcaaggacattgaggatttaagaaacgctttaaaatcttacacataaattaaaatatcgaacaaaggaaaaaaacaattgtaacaaaaataatttacattaaaatttacaagtttttttctagtgtcgtacttttttacaatgcgtctgttgtccgtcgagcattgcaaacatattgtggacggcgcaaaatagcaaacaaaaggcacgtccgcgctctcccacgctattctaaaacgatgaatccatattaatttttcattgtcgccaaacgtcgctccgctgcctccttccaataacaaatactcagaaacacaaacatgtacaattgctgtcgcggcgttaattgtcgctgtttttccaaatagtctattatgggaaacaaacacttgtcacaacacaaatactcgttaattgtcacaaccgacaagcacatttggcaaaatgcgtcgcaatttttgtacggacgagattctatgcgaagttcgttgtccatgacgtcttgggtccactttttcaacaagacacttttatatttgtgatttgtacaactttggtacgtgttagagtgtttttgataagctttgataagtttaaaactgttggagtaaggccacgtcattatgttctgcaccttttgtttaaaagacagaaattactatatgttcaaactatttaaagattattggccaacgtgcacgacagaatgccagatatgtcttgagaaaattgacgataacgggggcatagtggcaatgcccgacactggcatgttaaacttggaaaagatgtttcacgaacaatgtattcagcgttggcgtcgcgaacatactcgagatccctttaatcgtgttataaaatattattttaactttcccccaaaaacactagaggagtgcaacgtgatgcttcgagaaactaaagggtctataggcgatcacgaaattgatcgcgtttacaaacgcgtttatcaacgcgttacacaggaagacgccctggacattgaactcgattttaggcatttttttaaaatgcaatcatgacgaacgtatggttcgcgacggacgtcaacctgatcaattgtgtactgaaagataatttatttttgatagataataattacattattttaaatgtgttcgaccaagaaaccgatcaagttagacctctgtgcctcggtgaaattaacgcccttcaaaccgatgcggccgcccaagccgatgcaatgctggatacatcctcgacgagcgaattgcaaagtaacgcgtccacgtaacaattattcagatcccgataacgaaaacgacatgttgcacatgaccgtgttaaacagcgtgtttttgaacgagcacgcgaaattgtattatcggcacttgttgcgcaacgatcaagccgaggcgagaaaaacaattctcaacgccgacagcgtgtacgagtgcatgttaattagaccaattcgtacggaacattttagaagcgtcgacgaggctggcgaacacaacatgagcgttttaaagatcatcatcgatgcggtcatcaagtacattggcaaactggccgacgacgagtacattttgatagcggaccgcatgtatgtcgatttaatctattccgaatttagggccattattttgcctcaaagcgcgtacattatcaaaggagattacgcagaaagcgatagtgaaagcgggcaaagtgtcgacgtttgtaatgaactcgaatatccttggaaattaattacggcgaacaattgtattgtttctacggacgagtcacgtcagtcgcaatacatttatcgcacttttcttttgtacaatacagtcttgaccgcaattcttaaacaaaacaatccattcgacgtaattgccgaaaatacttctatttcaattatagtcaggaatttgggcagctgtccaaacaataaagatcgggtaaagtgctgcgatcttaattacggcggcgtcccgccgggacatgtcatgtgcccgccgcgtgagatcaccaaaaaattttttcattacgcaaagtgggttcgaaatcccaacaagtacaaacgatacagcgagttaatcgcgcgccaatcagaaaccggcggcggatctgcgagtttacgcgaaaacgtaaacaaccagctacacgctcgagatgtgtctcaattacatttattggattgggaaaactttatgggtgaattcagcagttattttggtctgcacgcacacaacgtgtagcatcgccagtatttaacagctgacctatttgttaaacaagcattcttatctcaataattggtccgacgtggtgacaattgtatccacaatcatgaaaaaagtagcgcttggaaaaattatcgaaaacacagtagaaagcaaatataaaagcaacagtgtgtcgtcgtcattgtcaacgggcgccagtgcaaaattgagtttaagcgaatattacaaaacttttgaagcaaataaagtgggccagcacactacgtacgacgtggtcggcaagcgagattacacgaaatttgacaaattggtgaaaaaatattgacatgctgcgatcaatcatgcgacgtttcaagagtacaaacaatctcagcaaaaaaccctccgattattatgtagtgttatgtccaaagtgttattttgtgacgtcggccgaagtgagcgtggctgaatacatagaaatgcataaaaattttaacacgaaattcgccgatcggtgccctaacgattttattgtgaccaactctaaaagttggaataatcatgaaaattgttctgccctattttaccctctgtgttaataaagtttgttgtttgtattttgtggttttatttatttacgctagatattgggtttaaggttcttagaaatagagttgtattttccctaccaaaagggatttgagcttcatataaatacaatattcgctcgacaagcggtttatttcactcggaggtattatatcaggcagtcgaacgtgcgcgatgaaacatcccgtttacgctagatatttggagtttgatgatgtagtgttagatttgactagtttaatatttttagagtttgataacgctcaaaatgaagagtacattatttttatgaatgtaaaaaaggcgttttacaaaaactttcacattacttgtgatctgtcgcttgaaacgctgaccgtgttggtgtacgaaaaagctcgcctaattgtgaaacaaatggagtttgagcagccgccaaactttgttaattttatcagtttcaacgcgaccgacaacgacaactccatgataatagacttgtgttccgacgcgcgcataatcgtggccaagaagctgacgcccgacgaaacgtatcatcagcgcgtgtccggatttttggattttcaaaaacgtaactgcatacctcggcccccaatcgagtcggacccaaaagtgcgagacgccttggatcgtgaactagaaataaaactatacaagtagaaaaaaattaatttattaatagttgtaataattatcttcgtcctcatcttcgctggtgtcataatgcggtggtgtgtttgtgttttgttttaatcgtttgcgcgtcgacaccacttcgccgataggaaattttttggatttcgcattaaatgccctcttagcgacgcgccgtttacgactactaaacatgttgacgcgctcgtcgtcttcagtgtcataatccgtgctagtgttttcgttgttattttctatgagacgatcgtttgatttagttttcgtagaattgtccgcgttatcgtcgctttcgtcgatgtcgtccctaactatctcgtaggcggctttgcgcggaatccaagattttgcaatgtatctattttaacgtacttttcttcgagcgcttttctagctttatgcatagcaatgtcttcgtcgccgccgttcattttatgatactttgtaaacgtctcgacgaataactttttggcgcgaggaggcattttttcattgtataacatatcgggaatttgatacattgtaattagaattaagcaagttcgtcttcggttgtactgtattcggtttctgtatctgtagtggaatcctctgtactagtagtagtgtcgctattgttggcgtcaggccttggctgccatttaccgtctatcaacatgtattttttcctaacagcacaacatgctagcttggtagctatctgtgtcgacttatatttttgtaaactacgatcgtagaatttttcaaatatcctcttaccgttatagggaaggttttgataatatttaggcaacatatcaataaaagacaatataaaaactttgtgtttgtgttttatttatcacataaaatggacgtctggcaagaatcacaaccaatattagtgttttttttcttacattacgagattcaacttgatactaaaattaattattaattaaattaaattaaattttgaagcattttttcgctatcgttttcagactcaaaattatcgacgctatcgctatgaaaagcgtaatatttgttggctttgagatattctatattttgctcatttttaacaataaacacgcgactcttttcgtcgcgtctcaccataacaccgtttttacaaatggaaatgtatttgtaaaacggcaacagagcgtcgcgagtttttttaagtaacagcttttgctccgctgtggcggccacaaatatttttacgggcccgtcgtaattaatgtttaaattaaaatttttaagtcgacgctcgcgcgacttggtttgccattctttagcgcgcgtcgcgtcacacagcttggccacaatgtggtttttgtcaaacgaagattctatgacgtgtttaaagtttaggtcgagtaaagcgcaaatcttttttaaataatagtttctaatttttttattattcagcctgctgtcgtgaataccgtatatctcaacgctgtctgtgagattgtcgtattctagcctttttagtttttcgctcatcgacttgatattgtccgacacattttcgtcgatttgcgttttgatcaacgacttgagcagagacacgttaatcaactgttcaaattgatccatattaactatatcaacccgatgcgtatatggtgcgtaaaatatattttttaaccctcttatactttgcactctgcgttaatacgcgttcgtgtacagacgtaatcatgttttcttttttggataaaactcctactgagtttgacctcatattagaccctcacaagttgcaaaacgtggcattttttaccaatgaagaatttaaagttattttaaaaaatttcatcacagatttaaagaagaaccaaaaattaaattatttcaacagtttaatcgaccaattaatcaacgtgtacacagacgcgtcggtgaaaaacacgcagcccgacgtgttggctaaaattatcaaatcaacttgtgttatagtcacagatttgccgtccaacgtgtttctcaaaaagttgaagaccaacaagtttacagacactattaattatttaattttgccccactttattttgtgggatcacaattttgttatatttttaaacaaagctttcaattctaaacatgaaaacgatctggttgacatttcgggcgctctgcagaaaatcaaacttacacacggtgtcatcaaagatcagttgcagagcaaaaacgggtacgcggtccaatacttgtacgcgacgtttctcaacacggcctcgttctacgccaacgtgcaatgtttaaatggtgtcaacgaaattatgccgccgcggagcagcgtaaagcgctattatggacgtgatgtggacaacgtgcgtgcatggaccacgcgtcatcccaacattagccagctgagtacgcaagtctcggacgtccacattaacgagtcatctaccgactggaatgtaaaagtgggtctgggaatatttcccggcgctaacacagactgcgacggtgacaaaaaaattattacatttttacccaaacctaattccctaatcgactcggaatgccttttgtacggcgaccctcggtttaatttcatttgctttgacaaaaaccgtttgtcgtttgtgtcacaacaaatttattatttgtacaaaaatattgacgcaatggaggcgttgtttaaatctacaccattggtttacgcgctgtggcaaaaacataaacatgagcagtttgcacagaggctagagatgttgttgcgtgatttttgcttaattgccagttcaaacgctagttatttactttttaaacagcttacacagctcatagctaacgaagaaatggtgtgcggagatgaagaaatattcaatttaggcggccaatttgtagacatgattaaaagcggtgctaaaggcagtcaaaatctgattaaaagcacgcaacaataccgacagactttaaatacagatattgaaactgtgtcttcacgagccaccaccagtttaaatagttacatatcttctcacaataaggtaaaagtgtgtggcgccgacatatatcataacacggttgtgttacagagcgtgtttattaaaaataactatgtttgttacaaaaacgacgaacgtacaatcatgaatatttgcgctttgccctctgagtttctgtttccagaacatttgctcgacatgttcattgaatgataatataaatagagcgcatttgattgcatgcaatcagtgttttattaattttagagcaacatgtacgataaatttatgatctatcttcacttgaatgggctgcacggagaagcaaaatactacaaatatttaatgtctcaaatggattttgaaaatcaagtagccgatgaaatcaagcggttttgtgaaactcgtctgaaaccggcaatcagttgcaacactttaactgcggaaagtctcaatacgctcgtagacagcgtagtctgcaaaaatggactgttaaatccttacgccaaagaagtacagtttgctttgcaatatctttttgacgatgacgaaatatccaaacgagatcaagatggctttaaactatttttattacataattatgacaggtgtgaaaatatggaagaatattttttaattaacaattttagcatagcagactacgaatttgaagacatgtttgaaattgttcgtattgattgtagagatctgttattacttcttgctaaatataatatgtaattaaaattttgtttgttttattaaaatcctggattaaaaaatgacgaataatttgatttgcgtgcacgccaacaagattcttcgtcattatgatcaatgcgtgcatcaagtttatgcttttgtaattggcttctgaccactttagccatttgagcgtatctgcattcgtcgtctagagtttcaaacaccagatcggcgcaattataaaatccttcacccacgggatctatgcgctgccaacgcacatacattacaaattgatttgacctgtacggtattactacgggtatagaatagactagactgttgtcacataatgaatcgcccggatttggaattaaatttgaatcgttaccacctatgtattctaattcgttccaagttattggattgcgacgatcccagtttgatttagtaataaacacttcaaaataactgggctcgtgtatggctgttggacaaaaatgaacattcatctgataaaccggttgatagcgatttaaatatagcgtatttggcctccagttgttaaaaggttcgtccattccgcttttatcaccaaacacagaattgcgatcgtttgaaccggcaccgcaaagtgtgtgcggcacaaccctttgtttgattaggtcaaaatcgtcataattaggaccggccacagccgcgtattccatatactgttgaaacatgtattgcgctgtggaagcggccgccccggattctaaatcgagagctcgatatttataatagactgatttgtaagcattgcggcacgcggcgtcgggaatgttatcgccattgtcgggccaataaaagtttccatctttaaaacatttatattgacgggccgtcggcacggacaaatagccgtgagagcgcactgccggcgcgtgaatcgcagcaaacaatgcaattaataatgcaatcattatgattatacttatagaacactaatcggaataataaccgctgtcgtaatcttggtcaaaaacgttatgttgaaacataataacaccttacagtaacatacaataaaacaacatagtatcgtatataattataaactttattttttcattttatacaaacaaaatttatacgtattgttagcacattgagtgtcattttcgctgtctgaactatcacaatcatcgtcatcatcatcatcattgtcatcgtcgtcgtcacgtttgcgtttgacactgcattttttttggttaattttcactaacactggttcttttcgatcgtacaattgattctgcatgtacttttgcatgatcgcggtaaaacactttgcaattttatccttttgttcgtcgccaaatatttccagcaactcgttcataaatgtgcacaaaatgcccatgtgttttatccagctgattcgcattttcactggatcgaacaaacgcaaggggtacgctttttctgttaccttgccttcgatgtctatcaaaaggtacgggatacgatctccgttgccgggcacaaaatccgtgcctttgttaaccaaaatttctctacaatgcctagccaccgtaatcacgcgtcttttgggtgacggaccctcattatcgtcagttgatttgcgttttttgcccgggttatcgttataggtcatactaaagctgtagtcggtcaacgattttgatttggcaaactcatcatagtattcataaaaactagtctgtaaactttgcaaacatttgtccatgtccaaatgacgcaatatttgttccactgccgtcctaaacgcgattctcataaaaacgggcatatcctttttaactaaccaacccttgtatacgattttattctcactgttgagatagcaatattttttcttttttaatagtattaaaactttcattaaattttcaaatgccattttgtaaccgtccgtgaatgagttattaacgcgtgtctcaacatgtgtgcatatttgttttaatgtgtcggtttcgttggatatttcgttatagttaaatgtgggcaaaacaaatgtagaatctgtgtcgccgtacacaactttaaaagtgatgctgcccagattgaatttttctaaaatctcagggtcgttgctcaaaccttcaatcagagaaatggccagccgcaactgattgcgaccaactctagtgatgtagtttgcaagcactttgtaaaaaatgccataataaccgtatatgctattggcggtgcgcttcacggaattttgtttttgatcgtacagatcgtacaagaatgccgattcgctttgattgtcgcgattctttttaaatttgcacctttcgcttaacaattttaatagcaatttaacaactattgcacgcgaattgtggttcaaatacacgttgccgtcttcgcataaaattaaattggacaaacaagcacaaatggctatcattatagtcaagtacaaagaattaaaatcgagagaaaacgcgttcttgtaaatgcctgcacgaggttttaacactttgccgcctttgtacttgaccgtttgattggcgggtcccaaattgatggcatctttaggtatgttttttagaggtatcaattttcttttgagattagaaatacccgctgcggctttgtcggctttgaattggcccgatattattgacagatcgtttttgttaaaaaaatacgggtcaggctcctctttgccggtgctctcgttaatgcgcgtgtttgtgatggctgcgtaaaagcacgccacgctaatcaaatgcgaaatattacatatcacgtcgtctgtacacaaacgatgcaatatacattgcgaatatacagaatcggccattttcaatttgacaaacaattttatcggcaacatgcaatcctgcacgttgtacttggcaatcacgtccagccgtcgagtgttgtacatcttgaccatttcggtccaaggcaaatcgattttgttttcacccaaatagtaactactgattgtgttcaattgaaagttttcaactttatgctgattagaatcgctgctgaaaaatttatacaaatcaatgtgaatgtaatagttaaaataatacgtgtccactttgttgcccaacttgtttataaacagctttgtcgtcggcgccgcagccggcaaatcgtaacgctttaatagcattttggttttattcaatcgtccaagtatatagggcagatcaaatacgtctccgttaaaatccaaaatcacatcgggatttgtaatttttatcatgtcaaaaaacgctgtaatcatgtcgatttcattttgaaacatgaccacatacgtgtcatcgtcataggtctctggaatctgggtcggcagcttgtgatacataaaacaaaattttgcatactcgtcgtttttgtacaccacaaatcctatagacattatgcaatcaaccgatgctttcgacatgttgtggccgtccgaatgagtctcaatgtcatagcacgacaaaacgggcatgatgccgctggttaaagtcatttcatcgaccaactcaaagtcttcattaaaatgttgcaaattaaacatgcgcgtcgtcgatccaccgacatagttattttggcagcgttgtgttttcttgaatcgcatataggcgccttccacaaacggcgtttgcatgtgtacgcgattaacgttgtgaagaaacttgtccaaacacgccgcgttgtccgatggcgctgctttgtttctttcgtatttaatcacgtttatcttgttcaaataatttccttccacgcccggcgccacaaacgtggtgtagctgatgcacttgttgcggcaagacggaaatatgtgcttgtcgtagcattgtttgtaagaatacaaatttagttttactttaaagtaaaactgcagcactcgttctttgatatttgtattacaaaatgcaaacaagcaaccttgtttttcatcgtaatgcaaacgaatgatacgaaacgtatcggctgaagtaatattgaattctcctggttttgcatattctgcaaagcgcgttttgagttcattgtaaggatatattttcatttttaaatatgcagcgatggcccaaatatggaggcacagacgtcaacacgcgcactgtacacgatttgttaaacaccataaacaccatgagtgctcgaatcaaaactctggagcggtatgagcacgctttgcgagagattcacaaagtcgttgtaattttgaaaccgtccgcgaacacacatagctttgaacccgacgctctgccggcgttgattatgcaatttttatcggatttcgccggccgagatatcaacacgttgacgcacaacatcaactacaagtacgattacaattatccgccggcgcccgtgcccgcgatgcaaccaccgccaccgcctcctcaaccccccgcgccacctcaaccaccgtattacaacaattatccgtattatccgccgtatccgttttcgacaccgccgccaacacagccgccagaatcgaacgtcgcgggcgtcggcggctcgcaaagtttgaatcaaatcacgttgactaacgaggaggagtctgaactggcggctttatttaaaaacatgcaaacgaacatgacttgggaacttgttcaaaatttcgttgaagtgttaatcaggatcgtacgcgtgcacgtagtaaacaacgtgaccatgattaacgttatatcgtctataacttccgttcgaacattaattgattacaattttacagaatttattagatgcgtataccaaaaaacaaacatacgttttgcaatagatcagtatctgtgcactaacatagttacgtttatagatttttttactagagtcttttatttggtgatgcgaacaaattttcagttcaccacttttgaccaattgacccaatactctaacgaactttacacaagaattcaaacgagcatacttcaaagcgcggctcctctttctcctccgaccgtggaaacggtcaacagcgatatcgtcatttcaaatttgcaagaacaattaaaaagagaacgcgctttgatgcaacaaatcagcgagcaacatagaattgcaaacgaaagagtggaaactctgcaatcgcaatacgacgagttggatttaaagtataaagagatatttgaagacaaaagtgaattcgcacaacaaaaaagtgaaaacgtgcgaaaaattaaacaattagagagatccaacaaagaactcaacgacaccgtacagaaattgagagatgaaaatgccgaaagattgtctgaaatacaattgcaaaaaggcgatttggacgaatataaaaacatgaatcgccagttgaacgaggacatttataaactcaaaagaagaatagaatcgacatttgataaagattacgtcgaaaccttgaacgataaaattgaatcgttggaaaagcaattggatgataaacaaaatttaaaccgggaactaagaagcagcatttcaaaaatagacgaaactacacagaggtacaaacttgacgccaaagatattatggaactcaaacagtcggtatcgattaaagatcaagaaattgccatgaaaaacgctcaatatttagaattgagtgctatatatcaacaaactgtaaatgaattaactgcaactaaaaatgaattgtctcaagtcgcgacaaccaatcaaagtttatttgcagaaaatgaagaatctaaagtgcttttagaaggcacgttggcgtttatagatagcttttatcaaataattatgcagattgaaaaacctgattacgtgccgatttctaaaccacagcttacagcacaagaaagtatatatcaaacggattatatcaaagattggttgcaaaaattgaggtctaaactgtcaaacgccgacgttgccaatttgcaatcagtttccgaattgagtgatttaaaaagtcaaataatttctattgtaccacgaaatattgtaaatcgaattttaaaagaaaattataaagtaaaagtagaaaatgtcaatgcagaattactggaaagtgttgctgtcacaagtgctgtaagcgctttagtacagcaatatgaacgatcagaaaagcaaaacgttaaacttagacaagaattcgaaataaaattaaacgatttacaaagattattggagcaaaatcagactgattttgagtcaatatcagagtttatctcacgagatccggctttcaacagaaatttaaatgacgagcgattccaaaacttgaggcaacaatacgacgaaatgtctagtaaatattcagccttggaaacgactaaaattaaagagatggagtctattgcagatcaggctgtcaaatctgaaatgagtaaattaaacacacaactagatgaattaaactctttatttgttaaatataatcgtaaagctcaagacatatttgagtggaaaactagcatgcttaaaaggtacgaaacgttggcgcgaacaacagcggccagcgttcaaccaaacgtcgaatagaattacaaaaatttatattcattttcatcttcgtcatacttcaacagtcccaacacgttcatgttgtgattctcgccgttctcgacagttacgtaaatagttactttgattaaattatcttccagcagcattgagatttgattgaaatccgcacatagcttttgtagcgaatccgcttcggtttttttatttgtgttgacgtagaaaacagatttgttccatttgcccaagtcggaagaggtagaacagtcatccgaatcggcaatgttcaactcgtcgcttttaaactgcacaataaacttgttatcgcccatgtcattttcttccaattcgctttttaacacatttacattgtacgaagcaacgtgtttgttcgatcgactaatgttgatctttgcgtttgtgcaattttgcaaatttgaatatgcttcgctttctttagcctcgcacaattcgatgcgcgtagagttgaccacgttccaattcatgtacacgtttgatccattaaaaatttgttgacactttatactgtaaatggtaaagatttggttttcattgtcttttaaatatttaaacacctcattgatgtcgtcagacccctttatattgttcttgaatagatttattagtgttttcgcattgacagaacattccacttgaaccacgtcgggatcgtcgttgagatttttgtacacaacctcaaaaacaactttgtacaaaccgctgttgattttcttgtagataaatttgtactttacaataatattgacgccatcttcattttcaaaatgtttgttagtcaaatagtcgctcatgggggttgcagtttcaatttccatttcacattctttgtattcgttgatctgaatcatttgactaaactttgttttcacataatttaaactaatgtcatagcacttgccttcttccatgtctttgaaagattgcgaatcgccgtagtattcttgaattttgttgtcggacattattcgaaaagtgtaatggtattcattatcgatactcaacgtcattttgctcatcaatttaccactaatccttttgtaattttctctaatcttcttggggctactggccatagccatgcgttttataagcggctcaccgctactttctccagacaaagatcttttggtcgccatattgctgttgtcgatatgtgggaatctatccgatggcaaatactgaatggcgacgaaatcgaagtgtcgccagagcaccgttcgttagcgtggagggagttgattataaacgtggccagcaacacgccgctcgacaacacgttcagaacaatgtttcaaaaagccgattttgaaaatttcgactacaacacgccgattgtgtacaatttaaaaacaaaaactttaacaatgtacaacgagagaataagagcggctctgaacagacccgtccgatttaacgatcaaacggtcaatgttaatattgcgtacgtatttttgttctttatttgtatagttttgctgagcgtgttggccgtctttttcgacacaaacattgcgaccgacacgaagagtaaaaatgttgcagcaaaaattaaataaactcaaagatggtttgaacacgttcagcagcaagtcggtggtttgcgctcgctcaaaattatttgacaaacgcccaacgcgcagacctagatgttggcgaaaactatcagagatcgacaaaaagtttcacgtttgccgacacgttgacacgtttttggatttgtgcggcggaccgggcgagtttgccaactataccatgtcgttgaacccgctttgcaaagcgtatggcgtcacgttgacaaacaactcggtgtgcgtgtacaaaccgacagtgcgcaaacgcaaaaatttcacaaccattacggggcccgacaagtcaggcgacgtgtttgataaaaatgttgtatttgagattagcatcaagtgtggcaacgcgtgcgatctggtgttggcagatggctcggttgacgttaatggacgcgaaaacgaacaagaacgtctcaactttgatttgatcatgtgcgagacgcagctaattttaatttgcctgcgtcccggcggcaattgcgttttaaaagttttcgacgcgtttgaacacgaaacgatccaaatgctaaacaagtttgttaaccatttcgaaaaatgggttttatacaaaccgccttcttctcggcctgccaattccgaacgctatttaatttgtttcaataaattagttagaccgtattgtaacaattatgtcaacgagttggaaaaacagtttgaaaaatattatcgcatacaattaaaaaacttaaacaagttgataaacttgttgaaaatataacgtgtgtataaaaagccagcggcttcaaatcaggcatcattcaacatggattcgctagccaatttgtgcttgaaaaccctgccttacaagtttgagccgcctaagtttttacgaacaaaatattgcgacgcatgtcgctacagatttttaccaaaattttctgatgaaaaattttgtggacaatgcatatgcaacatatgcaacaatccaaaaaatatagattgtccatcatcatatatatcgaaaattaaaccgaagaaagaaaacaaagaaatatatattaccagcaacaagtttaataaaacgtgcaaaaacgaatgtaatcaacaatcaaaccggagatgtttaatttcctattttacaaatgaaagttgtaaagagctcaattgttgttggtttaataaaaactgttacatgtgtttggaatataaaaagaatttatacaatgtaaatttgtatacgattgatggtcattgtccttcgtttaaagccgtttgtttttcatgtataaaaagaatcaaaacgtgccaagtttgcaatcaacctttattgaaaatgtacaaagagaagcaagaagagcgtttgaagatgcagtcgctgtacgcaacgttggccgatgtagatttaaaaatattagacatttacgatgtcgacaattattctagaaaaatgatattgtgtgctcaatgtcatatatttgcacgctgtttttgtaccaataccatgcaatgtttttgtcctcgacagggttataagtgtgaatgtatatgccgacgatctaaatattttaaaaataatgtattgtgtgttaaaagtaaagcggcttgttttaataaaatgaaaataaaacgtgttccaaaatggaagcatagtgtagattatactttcaaaagtatatacaagttaataaatgtttaattttaaggatattgttatggaataaactataaaatgaatttgatgcaatttaattttttgatactttccacagacggtagattcagaacgatggcaaacatgtcgctagacaatgagtacaaacttgaattggccaaaacggggctgttttctcacaataacctgattaaatgtataggctgtcgcacgattttggacaagattaacgccaagcaaattaaacgacacacgtattcgaattattgcatatcgtcaaccaacgcgttgatgttcaatgaatcgatgagaaaaaaatcatttacgagttttaaaagctctcggcgtcagtttgcatcacaatccgtggtcgttgacatgttggctcgtcgcggcttctattattttggcaaagccggccatttgcgttgttccggatgccatatagtttttaaatataaaagcgtagacgacgcccaacgccggcacaaacaaaattgcaagtttctcaacgcaatagaagactattccgtcaatgaacaatttggcaaactcgatgttgcggaaaaagaaatactggctgccgatttgattcctccgcggctaagcgttaaaccttcggcgccgcccgccgaaccgctaactcaacaggtctccgaatgcaaagtttgttttgatagagaaaaatcggtgtgtttcatgccgtgccgtcacctggctgtgtgcacggaatgttcgcgtcggtgcaagcgttgttgtgtgtgcaacgcaaaaattatgcagcgcatcgaaacattacctcagtaaacattgcaaacgactacgacattctttaaaaataagctatatataaatattgcattgtatgacaaaaaaattattaacctactgcaaagtaaaacttgtaaaaggcttttcaaaaaaatttgcgagtttattttgtcgctgcgtcgtgtcgcatctaagcgacgaagacgacagcgacggtgatcgctattatcagtataataacaattgtaatttcatatacataaatattgtaaaataaaagacatattattgtacataatgttttattgtaattaaattaatacaccaatttaaacacatgttgatgttgttgtgaataatttttaaatttttacttttttcgtcaaacactatggcgttgctttcgattagttttttcgttagcatttcatctaaaaaatcaaactgtttgcccggcgcgtttagggattctatggtgtagtcgggcgtgtcgctgtttagatattggtccacttcgcgcattatgtccaagacgttgttctgcaaatgaatgagctttgtcaccacgtccacggacgtgttcatgtttcttttttgaaaactaaattgcaacaattgtacgtgtccactatacaattcggcttaatatactcgtcggcgcaatcgtatttgcaatccaatttcgtgttcaacaaattggtgatgatatctttgaacgtgcacgttttcaatttgtccttatcggccaacgcaagtttcaattcgctctgtaaagtttctaaaattttgtctttattgttgtcaaattcgtgcgtgttgcgttccaaccacaatttgaacggctcgtcgacaaaaatgctgcgcaacacctcgtacaactgtctgcctaacgtgtacacttgctcgtattctttcatgctgacctctttgctaacgtacattactaaaaaatctacaagtattttcaaacatttgtaataggcgacgtattttgatttaagttttaaaccgtccaccgtgtattcgtccacgttcgcatcgaccacttttcgattattatcgccgcttgttgccggcgcgtcggcctgttcggttttaactatatccggttcaatatttaaagtttcaaaagatttaatggcattcataaaatcatctttttgctttggcgtggtcaatggtaaatctatcgaggagttgtcgtccgtgtgctcttcgggcacgctgttcagacgtaacgtaatctttttgggatcgtcttcatcgggtatcaaatcggctttaattttattagaattgagcaacgacatggtggtcgcttgtaaatttaataaattaattaaagactgaaattgtatattgcacaaatttattttcatttttattgatcttactattaatacgctggcagttggtatgcttcatccatttttgtgactagaaaatttgctaaaaaactgagctcgtcctgtgttaaaacgttgtcgtccacgaatctatgcaatgtaaatgttacactgacattgtttaacaatgcatgtattaaaaaatcaacctgtcgcctactgagtttattagaagagtcgaccgtttctactagtttgtagattttgttattttcaatttcattgtttaaaaacatgttaactactcgtttgagtttaagcgaaaaatccttgtccggatagacttgttcgcacagccaattgctaagagtggttttgaccacggacaccttggtggtgaacgtcgtcgatttgaccagttcggtgaaaaagtttttcattaaattggacattttaacaaacacttatcaatctattgagctggtatttttgtttagaatcgcatcaagcgcttgctcgatctccaatttttttcggacgctcttagctttatgactcggtatgtcttctacggtagactcggtgttcttacttataatggccgggctgacgataataaacacgagaaacaatatgagcagatacaaaaagatgctgttttcctttttgtcatacactaggctaaatatggccagtgcgcccaacaacaaatataaattcatttttattcccttactctattcgttgcgatagtacaacaacgattctcccgacgaaccggacgaattgcgattatgctgcgcgtcgtcgtcgtcgttgttgttctcctcttcgctgctcgtttcgtctaaacctatattgtatttgttcaagtaatgtttggtgcttgcggaggattcgtggttcattaatttggccactttttgtaaaggcacgccgctattgtataggttactgctcaaataatgtcttatcatgttgctgcgcggccgttccatctcgacgcccgactcttcaaggagtcgcctgaaatctttgaagggcgtcgaggtgtttttagatatttgcaaaatggtcgggtttcgtgaataaatctcgcgtgccaattccaacggtttcattttgatgttgttgagtgtgttattacgactgcgttttcgctttaaattaatcgtgtcgctgtgcagttttcctcttttaattagcacgttgagatcgtccacgctgagttggcgcgcttcgttgattcgcatacccgtccctaacatgatgcaaaacactatcgcgcccctaattagaccgcggtcgtgaacataatcgctgttgagcattttaattttatcattaataaaatttaatatggtatctattacgtttttaagcattaaattcttttccttttccctgatatttttgagctccttgtcgcgcggcagcataaccatgcggggaattttgtattcgggcaagttcatcatgttggtgtaaaagtttatagtcaactgtagtgtttctttggtgaccgagcgaagttcgagcatgcgcctgcacagttcttggggatcaatgagaagtgtttggttttctatcgagtcaaactccttgtccaacgagtacgacatgtcttccaggtgaacatcgtctaccgagcagtacacaattttaatgaatcgagacttgtaactttttaaagtggtgggcgcaaacggtttggggaacatgtacttgctccacagactgttgtttttcacctcgtcgggcgtgcatcgttgccgatcggtggccaaatcgaacacggactcgaaccggggagcggattgaatttttattttccaagaattaaaattgttttcgttgcgaacattaaaaccgttcattgtggttaatcaaatttattaaaaacaaaaggagaatcggtgtcaatactatccgaatattgttgttgttctcttaatattacgaaataatatattacatacagcagtaagaataaagctataaaagcgactacactaattaaaattataattcccgccgacacgttgctcgtcgtgttgtcatagcccaccatgtcgtttattggcattttgtgaacgggctcgctaaattgttgcggttcgctggcagtatcgtcgttgagcgccaatttcaacgggatgtattccaccttttcgtggttgcccaaccgatagtagggcacgtccaaattcatgtttacaacttatttgctaacaggaatttatgcaacaaaagtggtttggctttgatgagacgcaatttgaaatacttgctgcatttacgcttaagattgtattccatgcgggcggcggtgttgtagtcgtacgcgctcgcgctgtgatacacgagccgtaaattggttgcgttgcgcaaacacttggcgccttgtttgttcgaatgctgttttatgcgtctgttaagattgctcgtgatgcccgtgtacaattttccattgtcttgccgcagaatgtacacgcaccacaccttgttggtgtacagagtcgtcgccatgattatgcagtgcgccctttcgtgttcggccgagtggcgttaggcgcagccgcggcaataatcgcgttggcgtccttgttgtaatttatttgttgaaaaataaaacgtcttagagtttcgttttggaacgccaattcggtcaagctctcctggcaagcgcttttggtcaaatgagcggccggcgaattgaccgcgttggcggccgacgttaagaaggtggcgttctggaacatgctgggctgcttgccggctcgcgtcgccagctcggccatgtaattgaatatgttggcagacgcagatagcggcgccaaaaacgcaacgttctcttttaaactcatgactcgcgccctgtttttttcgttcagcacgtagtggtagtaatcgccgccgccggcaaacagatcgtcaatcacggcgttgatcagatcgttgatcatgttgatgtgcggaaagcgacgcgactcgactgcgctctgtatgtttggcggcagagtggcgtgcttgagcaacagagtcatgtaattgttggccagctgctgattgaaaggtaacggaatgggaatgttgcacgtcaccgcttccgccaccatgtactggacggccagactgagttgtttggcggcctcggccaaagcgtctttgcccaacatatcagcgccaccgttgtaaaacttttgcgcgtacgccggcagcgaatttagcacaaacgatggctgaaatatatttgaatcgctcgacagggactcggccgcgttgctctgtcccaactctttttgcaaccgaatcaggtggcgtatcatggtttcctccgattcaaaccgctttaccacgtttacgctgattgggttcgtgtcgatgcacatgtcacgaatagtgtttataaaaagaatcatgagaggactaagttctgacatgtcattgcacctgtaatatctaataatcttttgaacaaaatccacacatttgttgtaccaaatagattcaccggcgtcgagcgtcggttctttgctcttgttgtacggtgcaatcgctaccgagtttgtgctgttgctgcggctcgtgtaatccatcctgttgtcgcgcgtggcgacggtcgtaggcaccgtcgccggcggcacgtacccgggcgcgttgtaagtttgcgcgctggtgaatatggccgttgccggattagagggatacctcagcggcggaggggtgttgtaataaaaattgccacgttcatctgtcatactttttatttgtactcttatgattacaaaactcaatatacggattacttataatatagttgttgtgacaaaaaagcgataataaaattaacaaaattatcaacaagttaatcatggaaaatttttcaacgttgaataacaacaacaaaatggcgcaggtcaacagcaccgtttgaaaactgacgcgccgacacaaaatgctttcgcaatttctaaaagccacattaaacgaattttcacctttgatataatcacgcagttcttttttacaacattcgtcgcacaaaattaacacctttataatgaggccgtcggtgtgtatcgtttgaaatgtccgcggttgactgcctggatgaaattcaaacgagtacccagtggacacgtgtatctgtgcaaaataatgggctaatatcgaggcgcccgtttttttaacctttacttttgatattttaataacattaatgttgttatttgcgtaatcagagtttttattgtggtgatcatcgtacaaataatgaagcaacagttcactatcgtatttaatcttgtttagcgttgtcaagtttttgtttcttaggcgttggagcgtctccgtcgtcgatattttcttcgaaatcgagtccaacaacgtcggcgtttccttcttgctcatcgatagcggcggcggaggcggcctctccgtcgtcgtcattcgcggtttctacagtgcgtttgggcgacgacgtgtgtacagcagcgtccgtcttactattatcggaccgccaaatttttgtttgaaataacatttggcccttgttcaactttatttcggcgcagttaaacattattgcattaagatcatattcgccgttttgcaccaaattgcacaaaacaccatagttgccgcacgacactgtagaataggcgtttttgtacaacaatctgagttgcggcgagctagccaccttgataatatgggcgccaacgccccgtttttttaagtaatattcgtcttcaattataaaatctagtacgttttcatcttcactgttgatttgggcgttcacgatgatgtctggcgtaatgttgctcatgcttgccatttttcttataatagcgtttactttaatgtatttggcaatttattttgaatttgacgaaacgactttcaccaagcggctccaagtgatgactgaatatgtgaagcgcaccaacgcagacgaacccacacccgacgtaataggctacgtgtcggatattatgcaaaacacttatattgtaacgtggttcaacaccgtcgacctttccacctatcacgaaagcgtgcatgatgaccggattgaaatttttgatttcttaaatcaaaaatttcaacctgttgatcgaatcgtacacgatcgcgttagagcaaatgatgaaaatcccaacgagtttattttgagcggcgacaaggccgacgtgaccatgaaatgccccgcatattttaactttgattacgcacaactaaaatgtgttcccgtgccgccgtgcgacaacaagtctgccggtctttatcccatggacgagcgtttgctggacacgttggtgttgaaccaacacttggacaaagattattctaccaacgcgcacttgtatcatcccacgttctatcttaggtgttttgcaaacggagcgcacgcagtcgaagaatgtccagataattacacgtttgacgcggaaaccggccagtgtaaagttaacgaattgtgtgaaaacaggccagacggctatatactatcatactttccctccaatttgctcgtcaaccagtttatgcagtgcgtaaatgggcgccacgtggtgggcgaatgccccgcgaataaaatatttgatcgcaacttaatgtcgtgcgtggaagcgcatccgtgcgcgtttaacggcgccggacacacgtacataacggccgatatcggcgacacgcaatatttcaaatgtttgaataataacgagtcacaactgataacgtgcatcaaccggatcagaaactctgacaaccagtacgagtgttccggcgactccagatgcatagatttacccaacggtacgggccaacatgtattcaaacacgttgacgacgatatttcgtacaacagtggccaattggtgtgcgataattttgaagttatttccgacatcgaatgtgatcaatcaaacgtgtttgaaaacgcgttgtttatggacaaatttagattaaacatgcaattcccaactgaggtgtttgacggcaccgcgtgcgtgccagccaccgcggacaatgtcaactttttacgttccacgtttgccattgaaaatattccaaaccattatggcatcgacatgcaaacctccatgttgggcacgaccgaaatggttaaacagttggtttccaaagatttgtcgttaaacaacgacgccatctttgctcaatggcttttgtatgcgagagacaaagacgccatcgggcttaacccgttcaccggcgagcctatcgactgttttggagacaacttgtacgatgtgtttgacgctagacgcgcaaacatttgtaacgattcgggaacgagcgttttaaaaacgctcaattttggcgatggcgagtttttaaacgtattgagcagcacgctgaccggaaaagatgaggattatcgccaattttgtgctatatcctacgaaaacggccaaaaaatcgtagaaaacgaacattttcagcgacgtatattgacaaatatactacagtcggacgtttgtgccgacctatatactacactttaccaaaaatatactacactaaactctaaatatactacaactccacttcaatataaccacactctcgtaaaacggcccaaaaatatcgaaatatatggggcaaatacacgtttaaaaaacgctacgattccaaaaaacgctgcaactattccgcccgtgtttaatccctttgaaaaccagccaaataacaggcaaaacgattctattctacccctgtttaacccttttcaaacgaccgacgccgtatggtacagcgaaccaggtggcgacgacgaccattgggtagtggcgccgccaaccgcaccacctccaccgcccgagccagaaccagagccagaacccgagccagaacccgagccagagttaccgtcaccgctaatattagacaacaaagatttattttattcatgccactactcggttccgtttttcaagctaaccagttgtcatgcggaaaatgacgtcattattgatgctttaaacgagttacgcaacaacgttaaagtggacgctgattgcgaattggccaaagacctatcgcacgttttgaacgcgtacgcttatgtgggcaatgggattggttgtagatccgcgtacgacggagatgcgatagtggtaaaaaaagaagccgtgcctagtcacgtgtacgccaacctgaacacgcaatccaacgacggcgtcaaatacaaccgttggttgcacgtcaaaaacggccaatacatggcgtgtcccgaagaattgtacgataacaacgaatttaaatgtaacatagaatcggataaattatactatttggataatttacaagaagattccattgtataaacattttatgtcgaaaacaaatgacatcattccggatcatgatttacgcgtagaattctacttgtaaagcaagttaaaataagccgtgtgcaaaaatgacatcagacaaatgacatcatctacctatcatgatcatgttaataatcatgttttaaaatgacatcagcttatgactaataattgatcgtgcgttacaagtagaattctactcgtaaagcgagtttagttttgaaaaacaaatgagtcatcattaaacatgttaataatcgtgtataaaggatgacatcatccactaatcgtgcgttacaagtagaattctactcgtaaagcgagttcggttttgaaaaacaaatgacatcatttcttgattgtgttttacacgtagaattctactcgtaaagtatgttcagtttaaaaaacaaatgacatcattttacagatgacatcatttcttgattatgttttacaagtagaattctactcgtaaagcaagtttagttttaaaaaacaaatgacatcatctcttgattatgttttacaagtagaattctactcgtaaagcgagtttagttttgaaaaacaaatgacatcatctcttgattatgttttacaagtagaattctactcgtaaagcgagtttagttttcaaaaacaaatgacatcatcccttgatcatgcgttacaagtagaattctactcgtaaagcgagttgaattttgattacaaatattttgtttatgatagcaagtataaataaccgcacaaagttaaatttttttcatttacttgtcaccatgtttcgaatataccctaataacacaactgtgcccggttgtttagtgggtgacattattcaagttcgttataaagatgtatcacatattcgctttttgtcagattatttatctttgatgcctaacgttgcgattgtaaacgaatatggacctaacaaccagttagtaataaaacgcaaaaacaaatcgctgaaaagcttgcaagatttgtgtctggacaaaatagccgtttcgctcaagaaaccttttcgtcagttaaaatcgttaaatgctgtttgtttgatgcgagacattatattttcgctgggtttaccaattatttttaatccggctttgctacaaagaaaagtgccgcagcgcagcgtgggatatttcatgaattcaaaattggaaaggtttgccaattgtgatcggggtcatgtcgttgaagagaaacaattgcagagtaatttgtatatagattatttttgtatgatttgtggtttaaatgtttttaaaataaaagaataacaatttacacattgttttattacatggataatgttgtttgtttgacattaaaggttatcatggtgcaatgattaataataaaacaatattatgacattattttcctgttattttacaatataaaatcacaccaattgtgcaaagttttattatttgtttgtcgacggtcgaggggtcagcggcgtgtgcaacaataaaaaacatgaagctgttaacaattttgattttattttattcattttttatgaatttgcaagcgctaccagattaccatcaagcaaataggtgtgtgttgctgggaactcgcattggatggaacgatgacaatagccaagatcccaacgtatattggaaatggtgttaaataaaagtgaatatattttttataaaattttttatttaaaattccaagtaatccctgcaaacattaaacactgtaggtatttttaaatcttgccacatgcgaacaacgcacggcctgtcgtcgaacaccgctattacattatattttcctctgatatagttgttaaacaattttaattttaataaataatctttacaagtatcgtctgaaggcctcataaacaatttatatgatttaatatcaaaatacttttcaatccagtttcgagtgggctgttcacaaattacgcttctcccgctcataaacacgataattgcgtcgtggcaatttgccaaatacttaacgcaagtaataacgtctaagcgggcttcatcttgagcaactctattatcaaaatcataaaacgatctatttgtgggcaaagctactgtaccgtctaaatcacataatacagcgcggggaaatttgtcgccgacaggaacgtaatattcgaaattatttacctttagaaactttttatattgctttttaatagtttctggatttaatggaaatttatcagagcgtttataattgcgttcaagagccgtttccaaagaaacgtccatcaaacgcgttaaaaaatggtaattatgcgttgcggccattttttgccacatgtccaccgattgagtgttcaaattagtgtcgctgacaaccacgttggcaccacattttgcggcttttaaaaactgttcaatgcacattttggtaatttgttcttctttagtttgtctacatttccgcgattggttatagaaagcgttcagttttgtataatcgccgtttaaaaacaacttaacgcgcacgtcgtctctgttgatttctgtatagccttttaaacttttggcatacgtgcttttgcccgaacccgaaatgcctatcaacaccaacaattgttttgaagaaggcaatttaattgttggagcaagtttattatttaatgcctgcttagtcgatacaaattttataatatttttgatcattttaattttttcaggctcggttaattttaaaaattcgctctccacatcgatcgtttgtgctttacgacatctgtacgctaaacatttccacggcaaagtttgcaccagttcgttgaaacgctgttgattcaaagtcaaacccgacaccataatatttattgtagactcgttggtgaacgtgtttctagcatcaacgtacggtttaatgacactttttaaatgcgggaaaagagctagaaagtcatcgtgttcgccatttataacaagctgcgccaatttagtaggattttcagcacggctctgatttttgtgcatgttcaaatacacgtcgcttttaatcttgcatagtggcgcgttgtttttatcgtaaactacaaatccttcttccaaatttttcaactgggccgcgtgttcgacacattcttgcacagacgtaaactcgtaacatttggggtatttgcaaaacggcaaattggaacagtaaaaataatcgcccgtttcgttgtttctgcttgccaaataccacaacgttggctgttcatcgtaaacggttacaattctgttgtgtttgcttgttaactcaaacatgtgagtcgacgcgcagtctaaatattcgttacacaacgcttgaaattgattgtgggcctcgtcaagttgaagagcttgcaaaactaaacgtttaaacgtcacgtctgacacgcaaaggttttctgcaaaagcacttcctcgggtgctggcatgccattcgccgttgtacttgtagattttaattaaacttccgtcgattttttcgtaaaacttaaaattctccttcgattggaacagtttgtgatgagcatcttcgccgccgatattttgtagcaattcttgaaaattaaagaaacgatcgaaagaacgcgacacaacggcgtacgtgcggctgttaagaattaaaccgcgacattccacgaccacaggatgatctcgatcgcgttcaaacgattcgtaattaagaaccatcaaatcgtgttcggtataatttttaattttgactttaaacttgtcacaaagatttttcactccgccgtttgcaagtagacgcgaaacgtgcaacatgattgctgtttaataatgcataccaatgctaaactgtctattatataaagtgcagtgataactttgttatcaacgcgttcgatgccgacatatataaacgcaatgtaacagtttttgctagtaccatcgcatacaacattatgaatacaaggggttgtgttaataataataaaatgatatttatgaatgctttgggcttgcaacctcaaagtaaattgaaaattattgcacataaaatactagaaaaatgtaaacgtgacgcgtacacgcgtttcaagggcgtaaaggcgatcaagaatgaactaaaaacatacaatcttacgttgcaacaatacaacgaggcgctcaatcagtgcgctttaaacgatagccgatggcgcgacacaaataattggcatcacgatattgaagaaggtgtgaaaataaacaagagacatatatatagagttaattttaattctaaaacccaagaaattgaagaatattattacattaaagtagaatgttatgtaaacagttaattaatctacatttattgtaacatttgtggtaatagtggcgttggttatacatttatatgattgtaatgttgtgtactcgttttgtaataaatttttgtgtttaatcaattcaatatttttatttgataaaaccttattttcgctactcaatttggcgtttttagacgcaagttttgcgtaatcgtcattgagcgattttagcgccttttcagttgtaattcgtttcagttgcaattctttaaaagatttatgcatgttgttgtagtcgcttttaattttgtctaacttttcttgcatagaaacgcttgtttgttgtaatttgtctaaatctaattgttgtttaatgttgagctgcgtttgttcggcaatgtctacctgtagtttttttagtatcgcttgtgcttcagacagcatagtgtcgtcggcatttgcgttgttgtcttctgcgtcgtccaacagacttttttcaaacaacacactggccaaagaggccgcatcaaaattagcgtttattttattccattgtgcgacactcgacgcgctgcatttaatcacatccacaacgtttcggtttacgctgtaaacgttgaaatgcaaactttcaaccctacacaagggacatggtactttttttcgttttctaatcttgcgtatacacattgagcataattgatgtttgcacgtgtctagttctaatacgggtattatagtcaatctgtctattggttgcagaaaataatttttaatttctgcaaccgaaaaacaaatgttgcattgcaatttaacaaactccatttttagacggctattcctccacctgcttcgcctgcaacaccaggcgcaggacctgccactgcgccgccgcccagagtagcgttaggatttgctcttggtataaagtcgttgcgcaaaaagttgttttctgaattgattatttggtatcccaaaaacagcggaacgtacgtcgggtattcttcgtatccgctaagcgttctgtccagctcacgtgtgtcgccttcaaatttcaaaacgtttctaatttgcaaacgattgggttgacttctcataatgtcactgcttcttatcgggttgtacaactcggggccgtcgggcacagacgcgaccagacccgtttcgtcaattatacacgtggcgcaatttctaaacctcaattcctccgtgtcgatttgcaagtactcgggcgctactgcgcgtcgaatcaaattttgcaaaaatccactgtaattgttaaataattgatcgccagcaccgcctcgaagcgctcgggcgttggtcacgtcaaagaaacgcaattcgtctcgcgacacccgcgaacaaaacgtgttcgggtttgtggtgtccagaatgctttttgtagttgcgtaaacgctgtgtataacgcgttgcgtgttgcttgtgaaaccttcggtatattttagattgtcgcatatagtgttaactgcgttttcgttgttatatatcaaatgaaagattagctgttcggcttgcatcatactgtttagattaaacacgtcttggtaattggttgcgcttggaattaaaattcgcttgatacctctttctttatttccaactaaatgcctagcgatcgtcattttgaattgattgtcgtcttcgtcgaaaatgggcaaaaccatttttgacattttaaaacgttttatgaggtggttgttgcaaataaaccatccatcgtcatgatacgcgtcgggcgaacacggcgatttgtatgttatgcacgcgtcgaacgacacgatggacgcgaaaatgcagcgattaactctcatttgtcgcggcgccatacccacgggcactagcgccatattgttgccgttataaatatggactacggcgattttgtgattgagaaagaaatctcttattcaataaattttagccaagatttgttgtataaaattttaaattcttatattgttcctaattattcgctggcacaacaatatttcgatttgtacgacgaaaacggctttcgcactcgtatacctattcagagcgcttgcaataacataatatcaagcgtgaaaaagactaattccaaacacaaaaaatttgtttattggcctaaagataccaacgcgttggtgccgttggtgtggagagaaagcaaagaaatcaaactgccttacaagactctttcgcacaacttgagtaaaataattaaagtgtacgtttaccaacacgataaaattgaaatcaaatttgaacatgtatatttttcgaaaagtgacattgatctatttgattccacgatggcgaacaagatatccaaactgctgactttgttggaaaatggggacgcttcagagacgctgcaaaactcgcaagtgggcagcgatgaaattttggcccgcatacgtctcgaatatgaatttgacgacgacgcgcccgacgacgcgcagctaaacgtgatgtgcaacataattgcggacatggaagcgttaaccgacgcgcaaaacatatcaccgttcgtgccgttgaccacgttgattgacaagatggcccctcgaaaatttgaacgggaacaaaaaatagtgtacggcgacgacgcgttcgacaacgcgtccgtaaaaaaatgggcgctcaaattggacggtatgcggggcagaggtctgtttatgcgcaatttttgcattattcaaaccgacgatatgcaattctacaaaaccaaaatggccaatctgtttgcgctaaacaacattgtggcctttcaatgcgaggttatggacaaacaaaagatttacattacagatttgctgcaagtgtttaaatacaaatacaacaatcgaacacagtacgaatgcggcgtgaacgcgtcatacgctatagatccggtgacggccatcgaatgtataaactacatgaacaacaacgtgcaaagcgtcacgttgaccgacacttgccccgcaattgaattgcggtttcagcaattttttgatccaccgctacagcagagcaattacatgaccgtgtccgtggacgggtatgtcgtgctcgacaccgagttgagatacgtcaaatataaatggatgccaacaaccgagttagagtatgacgccgtgaataagtcgtttaacacactcaatgggccattgaacggtctcatgattttaaccgacttgccggagttactgcacgaaaacatttacgaatgtgtaatcacggacacgacaataaacgtgttgaaacatcgtcgcgaccgaatcgtgccaaattaaagcacgttaagcggatacaacgggcagtccgagctgttaaagtcaatacaaccatcgttaacaaacgaatacgcattgttgtgacagctgaggatataaaaaggaatagagaagtaattgcaatgaaatatcccgttacaattccacggcacagcgtatgttgctcgagttctatcagttgcacacaacggcctaagaaaatttattaatgcttcatttgtatctatattagaaggataatacataggttcgcccaaaggactgggagaaggcggcggcgaaggtgtaggtgtaggaggaataggagaaggcggcggcgaaggtgtaggtgttggaggaataggagaaggcggcggcgaaggtgtaggtgtaggaggaataggagaaggtggaggtgtaggtgtaggtgttggaggtataggtgttggaggaggtgtaggtgtaggtgttggaggtataggtgttggaggaggtgtaggcgaaggtggagaaggtgtaggagtaggtggaggtgtaggtaacggtacaattggtggagatgtaggtggtggtacaattggtggatttggatacaattcctgaatgtcgtctaatatttttaaagttaataaaattattataaataaatttaatattattattattattattatcacaataatgtaccacatgttgcttaaatataaaaattaaacaaagaatgttgtattattgcaaatttaacaattttttgtattctccccatgtcatgcgttcgtaatgagcgggcggttttttatttctttgtatccacttgtaatcgttaatgtggttgtgaaaagtcatactgacgtaggccattaaatttttcatgagcatattatttgacacaactgcaacatctgcgcctgccgtttcttgctggtacgaatcgacaaacgtaatgtctgtgccgtatttttctttgtcaagtgcaatttctataagctcaatgtggtaaatgatgaaacctttgacgttcatataatgatcgcggcacatggcgcactgtagtatgaaaaatacgttgtaaaatagcaccttcattgttttcaactgctgcatgacaaaatctaaactgcttttgtctcgcgtatacaccatatcgtcgatgatgagactgagaaagtgcatggtgtcccatatggtagtaaacgtgtaagtaaaactcttgggctggcacgaacgcaaattgagttctgtggttttgtccataaattctatgcgaaactgttgcaagtccatgtcgggggatgcgttaatggcccattcgatcaactgctgcacctcgtacttttgaatgtctttgtatttcatcaaacacgcaaaatggtataagtaagttgcttgcgaagacaacagtttggtgaggtgcgtcgatttagaggctcgcaaaaggtctatgagacgaaacgaatacaacagatagctgtctttgtaacgagaaaaaagcggcgtcagcggtatcatggcgactagcaaaacgatcgtgctgtacttgtgtcaggcgccggccacagcgtcgttgtacgttagcgcagacacggacgccgacgagcctattatttatttcgaaaatattacagaatgtcttacggacgaccaatgcgacaagtttacttattttgctgaactcaaacaggagcaagccttatttatgaaaaaagtatacaaacacttggtgcttaaaaacgagggtgcttttaacaaacaccacgtattgttcgatgcaatgattatgtataagacatatgtgcatttggtcgacgagtctgcgttcggaagcaacgttatcaactattgcgaacagtttatcacggccatttttgaaatttttacgctcagcagtaaaatcgtcgtggccgtgcccgtcaattgggaaaacgataatttaagtgtacttttgaaacatttgcacaacctaaatctcattggaattgaaattgtaaattaaaacaaatcatgtggggaatcgtgttacttatcgttttgctcatactgttttatctttattggacgaatgcattaaatttcaattccttaaccgagtcgtcgcccagtttagggcagagcagcgactcggtggaattagacgagaacaaacaattaaacgtaaagctgaataacggccgggtggccaacttgcgcatcgcacacggcgataataaattgagccaagtgtatattgccgaaaaaccgctatctatagacgacatagtcaaagagggctccaacaaggtgggcactaacagcgtttttctgggcaccgtatacgactatggaatcaaatcaccaaacgcggccagcacatctagtaatgtaaccatgacgcgcggcgccgcaaactttgatatcaaggaattcaagtccatgtttatcgtattcaagggtgtgacgcccactaaaactgtagaggacaatggcatgttgcgattcgaagtcgacaacatgattgtgtgtttgatcgaccccaacacggcgccgctgtccgaacgagaggtgcgcgaattgcgcaaatctaattgcactttggtgtacacaagaaacgcggcagctcagcaagttttattggaaaataactttaccgtcattaatgctgaacaaaccgcctatctcaaaaactataaatcatacagagaaatgaattaataaaacaaaaagtctatttatataatatattatttattaacatacaaaatttggtacactagtgttcaaatcgtttctgttcaacgccattgtcatgttataaaacacatttgtagttttattgtaattatttttaaatttatttttaatttgctgtaataaaacttgttcattaaatacaaaagactttgaactacttgcgtttatattctttttataattgtactgaacaaacgaggggtgcaaaaagtttttgaaatgctgcacggcaatacctatcatctcctccattttgtcctctcctattgtaatagtggcactgcgcaccgttttaatgtttagaatgtaaatgagcgcatacagcggactattgttggtgctcaagcacattaggttgtgcttatgcatagggtcgttgctcagcagcgttttgtatactacaaagcccgttttggggtcgcgtctgtacattagtacgtgcgacaaaaacaaacgcaccggcgtcacaagcgactcgtaatacatgctttctatcggaaactgtttggacttgatgtgttcgtacacggagccggcaaacttgacgctgtctacaaacttatggttcgtgtaaacaatcaaaaatctgtcttgtacaccgtcgtcataatcgtccacgtacagcggcttgttgttaacaattaacattttgtagttggcttcatactttagcagcccttggtattttctgctcttggaatcgctcttgctcgaatcggcatgcttcttaaagtacgactcgctgcattgtttcaactcgttgatagtgtacaactgcgagttgagtttgctcacttccttgtcgctcgtttccttgttggactctccgctgtggttgtcatcgtcaaacttgtgcatcaacaccaaatagtccaacagctcaaaaaacgacgacttgcccgaacccggttcgccgggcatgtaaatagccttctttccgtaatctacgggaatggccaaactagcggcgaaatgcatcaacataatcgcgttcgcgtgattaaaattggtgaagcgtttaaagtacaaatagccttcgacaatctttttcaaataattgtacgagtactccttcaagtccactttggacatgatgatgcgcatgtagaatcgagtcagccaagtgggcaaatcgtccgtgctgcgcgccaatatgattttgtcccaccacacattgtacttcttcaagatcattaacgcgtcggcgtggtgcgtgtaaaatttggaaatgttatccgattcttcaaactgaacatcgggttcacgtgcaacatcatcgcgcaattcggttaaaaacaaacgtttatcattaaacttgtccatcaacatgtcgacatattcgattttgtgaattgttcgatacaagtactgaataattttgttgtgttctttggaaaaaaactctccgtgttggttaacaaattcgctgttcgtgcgaatcaacgtggtcgacacgtacgttttgttagtaaaaattagcatccaaatcaattcgctcaattctgcatcgttaccgaacatgtccgccatcaagcagacttttagcgcttttctattgatctttattttcttgtagcatttgcattttggtcgagatcccgataccgttgaccgacacggtttgcattttaggttgtgcaacatgtcggaaaccctgttcttgtttacgtacagagcgagcgtaatcagattttcatcgtccaaattccacaaatcgcgaaacaggttgtttaacgcgactcgcatatcggcttggcatgtgttgcaattgcccatgtagttaactatggccgtgttagtttttagcatttttacatctcggcacattttggcgatgtgataagttctataaatgctgagctcgtcggcgctagtagatagcatgtaattaaacgcgtcctcgggcaaatacttttcgtcggtgggcttcttgaatgtctgcggcaacgtggtgcccaacaaaaatggacagctcgaatgaaagctgttggtgaacacgttgtacacaccgtgcgttgtcaagtacaagtatttccaattgttaaattttatgttgctcaacttgtaacaattgcttttggtcaatttgaataggtcatcctctttctttacaatttgataatgtttgccgttgaaaaccaaattgactccggtcactacgttttccaattttctaaagaatcctttacacacaatgtcaggcggcaagtttagcgccatcacattctcgtacgtgtacgcccacaattcatcgtgatccaaaatttcgtttttagccgactgagtcaaatatatcatgtagtgtatgccaaaataatagcccaacgatacgcacaatttggtatcgtcaaagtcaaaccaatgattgcaggccctattaaacactattttctcttgttttttgtaaggctcacatcgcttcaaagcttcattcaaagcttctttgtcgcaggcaaataatgattcacacaaaagttccaaaaacagtttgatgtcggtttctctgtacgagaaattttcgttcttggtcaatatcttccacagtacatagattaaaaaatcaaaatttttaaatttgcttttttcaaagtattgttgtagaaggtttggatcgttggctcgttcgtgggtcgccaaaactttaaccatgttctcgtgaattgctataagccccaaattgatttgcgtttgaatgtagtctgcattttcgctgctcgccgatataatgggtacgatgcgcggttttctggaacgcgtgtcgctcaagtccacgtcgtttttgtcaaaattgttgttctcgaacactctgaggcttttgaggttgacgttgacgatatgcttgtacttgggcaccgtaatgcattcctccaaattaatgtcgtccctaatgtaattgaaaaaatttttatccgaattgaccagctcgccattaactttgcacgtggccacagtgccgtcggccattttgagtataaacaagtcttcgtgagaatcgtcaaacttggtttttccatttacaaacagcgtttgcggcggatcgtgattcgtgcgcaggctgagctcgacgttgagaaaacatttagggtcaaacacaaacaaatccacagggcctagttttttgttgtgtatgattggtatcgtgggttcgatgacaattccaaattttatatttaaaaacagctgccatccgttaaaagagaaagcttgctttttgggccagttgggccaataatagtaatcgcccgcttgcacgcatttgttaatgtatccagggtcggtgctcttgaaaaaatcttcaaaattaatatacttttgtatgatgtcatagtgcttcttcaaaatgaaaggttttacaaaaatgcaaaaatcgttactttccaacacccagtcgtggccgtctaatgtttgagctgcgtgtttctctgcaggttcttcggtgtcttcgcaagatgcgcccatgtcgtgtttcgcgcacggaccgttaaagttgtttctaattgtgtttaagaactgttgaaagttgttgacgtactcaaacaatctacgtgttcctgttcgcgtgtttctaatgattaaatgatttgcatcttgcaagttgttaatctcgtacgttttgtcttgaggcacgtttttcaaaaaaaattgtaaaatgttgtcaatcatgttggctatcgtgtttgtacttttcgtgttaatttatttaataatttcgatcaaaaatcaccatccattcttacatagaatagaaacgctaatacaagatttcaacaacacattgttgtttggcgcgtatgtacagatttacgatttaagcacgcccgcccgcaccgaacgattgtttattattgcgcccgaaaatgtggtgttgtataattttaacaaaacgctctattattacttggactcggcgaacgtgttttgtcccaacgagtttagcgtgaccacgttcacgcaatccactattaaaacgatcaacgagacgggaatatatgccaccgcatgcacgccggtcagcagcttgacgctaattgaacattttgcaacattaaaaaataacgtgcccgatcacacgctcgttctcgatgtggtcgaccaacagattcagttttcaatactcgacattatcaattatttgatttacaatggctacgtggatttgttggccgaataacgcgtatatagacgcttgtacgttcatcgtagtaatcattttaatacatttgattgaactaaacatacatctgcaatgggtgaaagagtcactaaattttgcaatggaaaacggcgataaagaagacagcgacaatgaatagagtttatatttttatttaataaaatattgttcgtaatccataatgttttgtattatttcattgtgataatgttcccaatcttgcacgggggtggggcatcgtttgactttgacgtagaaatcgtacgcgtagttattagttggcagatcgtcgacaagtgtgatcgacttgaaaaagtttacatttttatcgctcaaatatttaattacaatttttggcgatttgggtatattgttgtcggatcgatgattgtgaatgtcaaaaacaaatttattttcaatgaaacgcttttttaaattgtaatctacaatagcgttgtgtgaattttgaactaaatcagagcgttcttcttgaacggtggaaccttcgctgataatgatatcaaaatagccttccaaatcgacgtctcgcatcgagtgtgctacatgatctctactgccatacgaccacaagactaaaacgcaacccatctcgtgcaactcctgcaagctgtcatacacaaacggatctcgaatctcaacttgctcctcttcggttatgagagtgctgtccaaatcaaacacgaccacgtgcggaaatccccacgtcaaagattcgcttttgagagagaccactttgtagtgtggcaatagaaaccattctttaagaaacgaatacattggcggtttgttgctaagcacgcacatgtggcccaacactggcgttttgaatgcgcgtttaatattgtgcctgatgtcgcgcatgtcgtcggcgggcgctttgaatatttgcatacagtaattgtaattgttttctatgatcttgcacagctgcgggtcgttgcaaaattgaaatattacatattcaaaaaatttatacttttcaaagccaaggtatttgaggtcggcgtactcgcttaaaacgagaacatgtcgtttgatgatggcgtcgttaaggcgcaaacagatccatttgctttgaagcgaggaggccataatgtacaaaaatggaccagttacgccttatttaaactgtttaaagagtttcgtataaacaaaaactactctaaactaatagatttcttaacagaaaattttcccaacaacgtcaaaaacaaaacgttcaacttttcgtctaccggccatctgtttcactcgttgcacgcgtacgtgcccagcgtcagtgatttggtgaaagagcgcaaacaaattcgattgcagacagaatatttggcaaagctgttcaacaacacaataaacgatttcaaactgtacactgagctgtacgagtttatcgaacggaccgaaggcgtcgattgctgttgtccgtgccagctattgcacaagagtctactcaacaccaaaaattacgtggaaaacttaaattgcaaactgtttgacataaagccgcccaaatttaaaaaggaaccttttgacaacattctttacaagtattccctaaattacaaaagtttgttgttgaaaaaaaaggaaaaacataccagcactgggtgtacacgcaaaaagaaaatcaaacacaggcaaatattgaatgataaagttatttatttacaaaacagtaataaaaataaactatttgagcttagcgggcttagtttaaaatcttgcagacatgattttgtaacagtcgaaagccaaacgagggcaggcgacgaaatcgcttcgttcattcgctactgtcggctgtgtggaatgtctggttgttaatagtagcgtgttctgtaacttcggcgacctgtcgatgaacggctcctggatcttctgtatgtgcggggtctacccgggcggcgtctgtaacccgagcttctgcgcctgcgtgtcgaaccatatgtggtaccggttgaagaacggcgacggcgacgataaaccatgtttaaattgtgtaatttatgtagctgtaatttttaccttattaatattttttacgctttgcattcgacgactgaactcccaaatatatgtttaactcgtcttggtcgtttgaatttttgttgctgtgtttcctaatattttccatcaccttaaatatgttattgtaatcctcaatgttgaacttgcaattggacacggcatagttttccatagtcgtgtaaaacatggtattggctgcattgtaatacatccgactgagcgggtacggatctatgtgtttgagcagcctgttcaaaaactctgcatcgtcgcaaaacggaatttcggtaccgctgttgatgtattgttgcggctgcaacatttgtatcttttcgccgcgctcgatcaacaattcttcaagagtggtgcgtttgtcgcgctgtaaagccacgttttgtaacagcactattttcgcatatctcataatcggactgttgaaacagcgtgcaaacgacgaccgcataatatcgacggtcgtcaagtcgattgtggtcgaaggcatctccaacagagatcgcacggcgtccaacagcgtgtccgtttgaacctgcgtcatttgcggtctgcacgtgtagtcgtcaaacgtggtttcgagcagtttgaacaacgaatgatacttttccgatcgcagcaaaaatatcatggtcatgaccacgtcgctgattttgtattctgtagaactggtgctgttcaacgaatagtgatggattagtttgcgagcagcatttctgtatcggcgcatgttgatcaactcttcggaaggctgcgcgggcgcggcggcgttggctcgcgcaaacaaatttattacgggacgcggcgtaggctgcgcggacgctggcgcggcgacgacgtccgcgtttcccgccgcgtactgagacgctatggcagcgttgttatttaaaattgtgttttgcgatttgcgagccacgtgcatcataaaatttatcaacacgtcggtgttcaactgcacgctttgatgttcgtcgcagagcaaaggaaatagctggggccatatcgccaattgcataggctcgtctatttttaaccgcaatttgtttatttccaaatacaacgcgatagcgctcatcgtgaccgacgacgcacacttactctgtaactatcacttggatcgtgttgtcgtaaacgcttcccaaaaagtctaacacgttgaccgtttcgattctattcaacttaattgtggacgcgttggcttgcatcggttccaacagactgcgcgctccgacagattgagtagacaaaatttttaaactttccgtcttattgggcgtaatgtcgttgattaacaacgacgcagccgtttgagaggccgcagtgttgatggtttgcaacatgtcgacggccgccatttgcgtttgcgccgaaggtcttgctggcggcctgttgcggcggtttcttcgtgcttgcgacatgttgtcgtcagtgtccatatcggtatcatttattgaagcaatcatggttgagttcgataagcagagatatttcgttgtccaattggtacttggtaatgatgtgccttataaatgtttcgggcacaatcatttctgtcattagcacgttacaaatatctattttgatcaatttcaatttatgaattaacagattaatgttttcgtccgagtacttgctcatgatgaaacgacaaacgttgcggagttccaactccgctaccggatacgctttgttgggcaaactctctaaatagtgtctcaaataaaagccgatcaatacggtggacgctattttgttaacctttttcattttagtattgcggcccatttctatcatgaagtttttaaacggtagcaacagcctgtctccgttagcaacagtggagcagccgttgcattgcgcgctcaaaatactcaacacgcgctcgtgatcttcttggcgcaatccgacggttgcttttttgcattctttgacaaatggcacgcacatgtcgcgtttcgtgtacaaagaatacgctttgtcgcaaatcaagttatagaaaaattgcacaaatatctgcgtaatcaagttgttttcgttaataatgtcactttcgtttttgtaatcggttcgaagcaacacgtacaacatcagaggcatgccgaacatgggtcttaaaaaaatgtcccaaccattttgcaagcccgcgtcgagggtgctcagcgaggacgccaagtatttgcatttgcactcaaaacattgaattttgtttgcgggcttgcacgactgacacatgatcgcatccacgtcgggtgccggcgtcggattgtaatatttttgcaagtattgcataatggtcctaaaatggggtacctgtttgataaactcgtcgcgcaaaaatatcgaaaaaatgttttttacattgtgtatgttgtctgtgttgttggcttgattctcaaaactactctttatggaaacaatacatttgttaaattctgtgaaaaaagtaagacctttactgtccacgatcaagctttggttgaaatattttgaaaataaaaaacacaacgaatcgatttcatcttgtaacaattgcgcttcaaaacacacgttttcaaagcggtcgtaaatgttaaaccttaaactgtattgtaatctgtaagcgcacatggtgcattcgatataaccttataatatgaacgattccaattctctgttgattacgcgtttggcagcgcaaatactgtccagaaacatgcaaacggtggatgtgattgttgacgacaaaacgctcagtttggaagaaaaaatagacacgttgaccagcatggtgttggctgtaaatagcccgccgcaatcgccgccgcgggtaacatccagcgacctggccgcatcgatcattaaaaataacagcaaaatggtgggcaacgattttgaaatgcgatacaacgtgttgcgtatggccgtcgtttttgttaagcattatcccaagtattacaacgagacgaccgccggtttagttgccgaaatagaaagtaatctgttgcaatatcaaaattatgtaaaccaaggcaattatcagaacattgagggttacgatagtttattaaataaggcggaagagtgttatgttaaaattgatagactatttaaagagagcattaaaaaaatcatggacgacacggaagcgttcgaaagagaacaggaagcggagagattgagggccgaacaaactgccgcaaacgctcttctggagaggcgagcgcagacgtccgcagacgatgtcgttaatcgtgccgacgccaatattcccacggcatttagcgatccgcttccaggccccagcgcgccgcggtacatgtacgaaagttcagagtcggacacgtacatggaaaccgcccgacgtaccgccgaacattacaccgatcaggacaaagactacaacgcggcgtacactgccgacgagtacaattccctggtcaagacggttcttttgcgtttaatcgaaaaggcgctggccactctaaaaaatcggttgcacataacaactattgatcaattgaaaaagtttagagattatctgaatagcgatgctgatgctggagaatttcaaatatttttaaaccaggaagattgtgtgatactgaaaaatttgtcaaatttagcgtcaaagtttttcaacgttcgttgcgtggccgacacgttagaggtaatgttggaagcgcttcgcaataatattgagttggtgcagcctgaaagcgatgccgtacggcgaatagtcataaaaatgacgcaagaaattaaagattcgagcacgccgctgtacaacattgccatgtacaaaagcgattatgacgccataaaaaacaaaaacattaaaaccttgttcgacttgtacaacgacaggctgccaatcaatttcttggacacgtccgcaaccagtccagttcgcaaaacttccggcaagagatctgcggaagacgacttgttgccgactcgcagcagcaaacgtgccaatagacccgaaattaatgtaatatcgtcagaagacgagcaggaagatgatgacgttgaagatgtcgactacgaaaaagaaagtaaacgcagaaaattagaagacgaagattttctcaaattaaaagcattagaatttagcaaggacattgtcaacgaaaagcttcaaaaaattattgtggtcaccgacggtatgaaacggctgtacgaatactgcaactgcaaaaattctttagagactttaccgagcgccgctaactatggcagcttgctcaaaaggctaaacctgtacaatctcgatcatatcgaaatgaatgtaaatttttacgagttgctgtttccattgacactgtacaatgacaatgataacagtgacaaaacgctttctcatcaattggtaaattacatatttttggccagtaactattttcaaaactgcgctaaaaacttcaactatatgcgcgaaacttttaacgtgtttggcccgtttaaacaaatcgactttatggtcatgtttgttataaaatttaactttttatgcgacatgcgtaattttgccaaattaatcgacgagctggtgcccaacaaacagcccaacatgagaattcacagcgtgttggtcatgcgggataaaattgttaaactagcttttagtaatttacaatttcaaaccttttcaaagaaagacaagtcgcgcaacacaaaacatttgcaaagactaataatgttgatgaacgcaaactacaatgttatataataaaaaattataaaatatttttaatttttatttatattcagtacatttacacatattaacatattgtttatacaaattcttataatcattatgatttaaattgaattgttgtctaaacaaattaaacactttattaaacaataacttttcgttgtaattttttactttgcacatgttataacaaaaaattaaaattttcatcatgtctgatttgtctatggcgtcacagttgcttttaatgtaatcgcaagttaaccactcaaaaggacccttttctatttttaatttgtttaaatctttataatcagacttcagtttgtaaattagatttccacatcgaataataaatccttccagcgggctttggggaaacattaaagacttgaaatttaacctttctacaaaatcgttgtacaaatatttgtgacacggaatagtattaaaccccacgttagtcaacaactcttgcgcctccacaaagggcacaaactccccgccgtataattgaatttcgtaagcgtagtatttcaaactctctttctggtccacgtagttaattacgttaatgggtgtcgtttttgcgtcgtctttccaacccattaattcgccgtagacaataaaaccgtcattgaaccgcgcctgaagcgatcgcatgcacgtttctaaatcttttcgaatgcggtaataattcataaaattgccgtccggtctgtaagtgtttcttgacccgtacgtaattttattttggttgcaaatgattctgaaattacaaccgtccaacttttcttgaacaataatttctttgtcggccaacgtaccttttttaccttgatctagatgcgacacagatggataaatttgatacacaattttattctcatcttcgggcattacgggtccgcgttcatttaacgcgtacatgacaatgttgtggcgaatgtcggtgcgctccggcggttctggcacgtggtgcagtctgtcctgcaattgttgcttccattgttgaaaatattcggtccattcttgttgatactcgccgcgttgcatgagttttacgtacagttttaaaagtttgacattctttacaaataacgttagagtttcgtcgattttgtatcctccattatttttgtttaaatccaatacatttaaatcgttcactaccagttgattgtttttatccatcgtaatttttatctcatcgcccacgttgaacaacatgtttaaaattttggtggatttcggcgcacgtttataatctaaataatattcaacgtacacgtaattgaacatgagctgcaacaatcctttggcattgttcaaaattttgtatctcatcaaagtataaataattttcaccatcgacaccgtcatcaacttggttacaaactcgtacaattgcaagttttcaataccgtatttgtctttaaaatcttcacgtttactgaacatgcttaattcgggagattttccagtcaaaatgccaattaatcccgtgtacaagtcaacgtatttgacatcgttgcccgattcatcttttgcatgtcgatttttcaaaagctctttattgtcgataaatttttcaaaggtctctcgatcacatttagtgtaaatatggtagtcagtgtcgctgctttcgaccgcgtatcccttggcatggctgcccgtatcaatgcaaatgtacaccatgttagaatgtgctgcttactgtgcctgtatcaagccttatatacctcaaaatatttcacatttttgcatcatcgtaaaatatacatgcatataattgtgtacaaaatatgactcattaatcgatcgtgcgttacaagtagaattctactggtaaagcaagttcggttgtgagccgtgtgcaaaacatgacatcataactaatcatgtttataatcatgtgcaaaatatgacatcatccgacgattgtgttttacaagtagaattctactcgtaaagcgagtttaaaaattttgtgacgtcaatgaaacaacgtgtaatattttttacaatatttaagtgaaacattatgacttccaataattttgtggatgtggatacgtttgcaagacaattgattacagataaatgtagtgctctaatcaaagtgcggatctgttgccggcaaacattttagagattgtagagaaggccagagacaagtattttgagggccaactcaaaaaaactatgaatacattaaaaaattatttttacgaaaaaatatatggacgattcgatagattataaagattttaacagacgcatcctattgatagtttttaaattcgctttaaacaagagcacaatactttccatcgtacaaagagatcatcgagtggccattaaacgtttaaacaaaattaaccccgatttaaagagttctccgcgcaatgcttcagcattacaatgaatgtttggaaaatctagacaatccagtcacggacgaacatcatttgttgacaaaagagttgctacaaaaatatttatcgaagcgtttgaatacagttacaccaacactaatgccatcagcatggacaaaacagatgaatttgattttattaaaccggcattgaaacctttgccagatgcaagaccgccatcgcttttggccaacgtgatgaacgaacgtaaaagaaaattacaaaacaccaactcaacggcaaaatgtttgctaccagcaccaccgccacaattgcgtaaacttgaaaaaaagaatcatttattgcctttgttttctttgtaattatattgttgcatttctatttctaatatcatagttttctaataaagtagtttcatatttttgtttttgtacagtaattgtttcttggtttaacaagatcacaaccaataacataaagaataacacaatcataacaaaaattaaaaagccgcatactactagaacaaattctttaattagcgatcggtttctatttacaaattggccgagctgatcgccttcagtcggcgagttgtgggcttggatgatgtcgacgatattgttgccggcgcgaccgcctgtcgctctcgatataatgtcggccgccgtcggtttcatgatgtgcttaactacaaataatagttgtacttgacgggcgtcaccgtgatgccgctgctaaaacctccgtccgttaagacgcgttgcgttacaaaattaatgtttgtccgattagcgtagtcggaataatcaaacgtgttgggcggactaaaatcgggcatgttgatgggcacaatgccgctggagctgatagcaatgctgtcgttcttgcaaaacagccgaatttttttgtagggctctgctttattcggcgcagacgacaccatctggtcaaagttgttcaattttatgattacgttgggtaccaattgataggggaaaattattttctggaacattttgacaaagtccacaaccgtttggctatagtcgggaatgccgagcaaagactgcgcctgtttaatgtatttgagactggagcggtttactgtagcgcaattggatggcacgtcgcccttcataagccggcgcgttctctcccaattcaatttgttgtacaaattatcaatctcctcgtgcggcagattgattacatagcgcgcgggctgtttgcgatattgaaagatgcaaaaaatgcgtttcaacgacaatatcttcaccatggtggacgtttccagattgaaacataacaaaaagtcattgctttccaccaattctttaaaatgagacagcggaatttcacaagcgatcggtcgcaaattgctttttattggaggcggaacgctttgaccgttgcggttttttagtaacgcgctgcacgcagattgcatgtccgtttcgggatacgtaaactcgatgggacatttggggttttcatggtgaacgatcatagtgttgcaataaaacaagttgttggtcaggagcacgctaaaaacacgcgtttcgcccgcaccgatttcggtgatgggtaccaacgggttccagtagactatggtggcggacgctgttttttttggcgatcgactgtctatgttaacatcatgctcgtgcctgtacactagcacagaattgaattttggaaattgttttttgtcaatgtacaaccggtcgtcgtctgtgggcacgtacacgatcaagttttcgattaatttgttgcctacgtcgctttgcggttccaccaaattgtgagggaacgcaaaaaagcgatcgctaatacaaacttgaatctgaaacgggcactccatcgtgatgtatatgtcttacttcattagactttagattattttaatttgtgaactcgtaccgtattcaatagggtgtcgggcacgtaattgtaatggtaaaacagatcctgttgaacacgtgcgttgttcactacgattgaaatgcaaaaatacatcaagtacataaacactatgattagaaaggtagcagacagaaaatatttcatctttaaatcttatgctagttgaataaaatacatagtacttttatacgtttatttatatttgttttctttgttataaccgtaattgtaaaacttgtgatcgtgctcgccaggcataatttctttgcacatcagcttgcgaatatatgtgacatcttcgtacaccgatttcttgatgttaccatcgtgaagcgttgtcggcttgagaggtttgcggtcgttgttgtaaaaattttgcaccgaataattatccatagtgcagcacaggcaatgtcactgatgcatatgctttaattttttattgcattcagttattatatgatttaataaacgtacacaatagcacgtttatcggttaaagataactttcaatatataaaagtgtttgaattgcgagaccgtcaacataacgtttatcaacgcgatgactaaacgacaatttgctttgctgtttgtgtggcaccacgacaaccaatttgtttgcaacacggacgaatacccgttttggcacaacattgaataccatgcacggcgctataaatgcatcgttttgtactgtgtggaaaacgacggatcgctacaactgcccgtttgcaaaaacataaatctcataaattataaaaaagcgtatcctcattattatggaaactgtgttgacagtatagtgaaacgtgctggcaaaaattgattatatgaaagtaactgcaatgttaaacccccacctgttggacgtcgcgtacaattatttgctgttgatggacatggattgtgtggtgcaaagcgtgcaatggaaacaattgtcaaccgacacgtattgttttgagccgttttacgactctcaaattaaatggttgtacgcgcccaaaagcggacaaagttttgatagttatcttgaaaactatgcaactctaattcgagtcaaacaagtgcagcaacatcgaaaagaattaatactgcattgtgtggattttcttacaatgaaagcaaatgacaattttatggtgttcaaaaattatattaacatgattataaaagtgtatttgcaattttacaattacagatttcccatcaattttgaggacaacacgatgaaaccttgtgtaaatttaacttttagacgtggcggcagttggaaaactcaactgcaacccgtatgcaattatgtttacaaaagtaaaaatatgccaaaatttattaaataaaacaaattaatttaaacaagcgtttttattgacaatactcacatttgatattatttataatcaagaaatgatgtcatttgttttcaaaattgaactggctttacgagtagaattttacttgtaaaacacaatcaagaaatgatgtcatttttgtacgtgattataaacatgtttaaacatggtacattgaacttaatttttgcaagttgataaacatgattaatgtacgactcatttgtttgtgcaagttgataaacgtgattaatatatgactcatatgtttgtgcaaaaatgatgtcatcgtacaaactcgctttacgagtagaattctacttgtaacgcatgatcaagggatgatgtcatttgtttttttaaaattcaactcgctttacgagtagaattctacttgtaaaacacaatcgagggatgatgtcatttgtagaatgatgtcatttgtttttcaaaaccgaactcgctttacgagtagaattctacttgtaacgcaagatcggtggatgatgtcattttaaaaatgatgtcatcgtacaaactcgctttacgagtagaattctacgtgtaaaacacgattacagcacttcgtagttgtatcgaaaattgttcaatggctctttgttaatgtcgtaattgattaatatgtcgtacaatttggcggcgttgtgtttgcacacgaccgtttttagttcttgaaacattttttcgtgtatgtttagcatgttgtatttcagagtgcgatgtgtaatgctggtgacgagcatcaaaatgataaaatctaaagcggctaatttgtaatcccgttcatacgctctgtaatcgccaacaactctgtggccagatctttttagattttgacaggcgttatggtacgaattgataatatttactatagtttctcttgttatcggtttgtcgattaaactgttaacaaacatcacgttgcccaagcgcgacggtttagacaccgacttgttttttgtctgttcaaatttgtacaaattaaaaacgctcatagactggtcgtcaggcagtgtgtcgttatacaaacaaaatggtaaaacgtttaattcgacaaacgacgagcacattaaagtttgttggctgttaacgtcctggggatgtaaactgttattcataacgtaacacacttcaatgtcggaatgcttgttttcaaatttgtccttgtctacagtttcaatggtgattgagcgaggtttgagtttattttctaaattcatttggatattttcaatatggtataccaccgacacgttgtgagccagcgatccttgattggttttaatcatattcaaaatattcatgatatggttgaaaaaagagtctgtcaaaacgtttgtgtcgttgttaaatatcgctttccagggtttactgttgcgtgactcaacgacggccgtgtaacataacaagcgcgccagttgcatgtgcgacaacttaatgttatcaatgtcggtgatgtttggcaccagattttcattgccgtcttccagtagcgtgctcagttcggtcgagtagttattcaacgatcgattgtgcgattcaaacaagtttactatcgcaggttgtacatagttttttatgtcgtcaaattgaattatatcgatcttgtccttgttctccagcataaacgacaaattttttaggtcgaatttaatatttggcgcgttttcgttggactttttgtaatttaacaacatcgccaacagtttgtgtaactcgccgttagcttgatctttgctaaacagtttattggtagcgtaattcacgttgtcgttcaaaaacagcaactcgttgatgatcattttttgtaaaagcgcgtacttgctcatgttgacagaatctcttacatttcagttgtaaacgcgtctgtacaaattggccatgcgattcggaatgcacacggggatcgtgcgagccagtgccgtttggcgaaatagcattttttcatagccgctcgaacaatcgcacgcgtccggcgaaaattgcaccgtgttcaaattcatattcaaccggccgtcgttgcatagataaggcctcggtgttcccgtatcgtccaccaagtctctgtacgtgctcacgcatgtttgagacacgacaaaatctccgccggcggagaaaacgtgaaccaagcccagtgcgggatcgcattctatcaagtccggagcctgcgcgtttaccaaagcgtcggaggcgttgcaaaagccatcctggcaggtcaactcgtttgcagcgctggagatcacgcagttgtctctacactgctgatccgtcacgcacggtaaccggttcaatgaacaatctacgcctcgattgcgctgaaacgtaaaatttaacggcggcgcttccaactcgttaatgtgcatgtatgcatcttgcaaaataaatttttgaacaaatttaaacgtgtacatgtacacgattagtataattaccagtagaataagtatttgccaaaagttcaacatgatcgtcttaactgagtgtgaaaagcgtggtgtgacgcacgaaatgactggttgcgcaaaaaataaaccggggtctatataactcggcgtcgaccgcgttcatttttaccgtcatgcatctgacggctaatgtattgctcgttcctaacgcgctcaaaaagcgggacgtgaaatacatttataatacctatttgaaaaattacagtgtaattgaaggtgtgatgtgttgcaatggcgattgtttggccgtggtggtgttggaccgaaatcagctgcaaaacacggacatggaagtgttggagagtttagaatacactagtgacaacattgaactgttatgcgaaaaaatatgtgtgatagttgataattacgacaagtattaccaaaaaaattgtgtataaataaaataccaaattttattatatcattttgttttatttaataattaaagaatacaacgccacatctattcctagtacaacaaataatttgattattatttttgagtgcacattaaaaaataacaaacagtgtaaaaatactacagaataatacaatacataaatattatagtaaatagctgcaattttgatagcgtaatttatactttgatatttttcaacgtacaacgttaaatgttgatacgcattattcacaaataacaaaatttttctaatatgccatttgtccgcaattgtttttgcgatatcaaagcctttttcaaacaattgaaaaattgcaaacaaaaccacgtacatgacgttatacatagtgttaaagtttttacataacaattctataatgaagaaaattgctaaacacggcatgagcgcgcacataatcgcgttggccgcaaatatctcgtacgtacaaaaatactcggacattctccaataagtaaaatgcattttgctattatactgttgtttcttctagtgattattgcaatagtgtacacgtatgtagacttgatagatgtgcaccatgaagaggtgcgttatcctattacggtttttgacaacacacgcgcgccgcttattgaaccgccgtccgaaatagtaatcgaaggcaatgcacacgaatgtcacaaaactttgacgccgtgcttcacacacggcgattgcgatctgtgccgcgaaggattagccaactgccagttgtttgacgaagatacaatagtcaagatgcgtggagatgacggccaagaacacgagacgcttattcgagcgggagaagcgtactgcttggctttggatcgagaacgcgcccgatcgtgtaaccccaacacgggtgtgtggttgttggccgaaactgaaactggtttcgctcttttgtgcaactgcttacggcccggacttgttacgcagctcaacatgtacgaagactgcaacgtgcccgtgggctgcgcgcctcacggccgtatcgacaatatcaacagcgcttcgatccggtgcgtgtgcgacgacgggtacgtgagcgactataacgccgacaccgaaactccgtattgccgtccgcgcaccgtgcgcgacgtaatgtacgacgagagtttttttccgcgggcgccatgcgcagacggccaagttcgtctggatcatccggcgctcaatgatttttaccgcagacactttagactcgaagacatttgcgtgatcgacccttgctcggtggacccgattagcgggcaacgcacatcgggacgcttatttcaccaaccaaccgtaaatggtgtgggaatcaacggatgcaattgtccggccgatgacgggttactgcccgtgtttaatcgacacaccgccgacacgggcatggttagacaaagcgaccgcaccgtcgcgaacgcttgcttgcagccgtttaacgtgcacatgttatcgttgcgtcatgtggattacaaatttttctggggccgcagcgaccacaccgagtttgccgacgcggacatggtgtttcaagcgaatgtcaaccaactcagtcacgaacggtatcgagcgattttgtactcgttgctcgagtcgcacccggacgtaacagaaatcgtaacagtcaacatgggtgtcatgaaaatttccgtgtcatacgataccacattgaaaaatatactattaccatcttctgtttttaggctatttagatttaaagaaagtggcactgctcagccggtatgcttctttccaggcgtaggacggtgcataaccgtcaattccgattcgtgcatcaggcgacacgctggtggtcaagtgtggaccgcagaaacgttcaccaactcgtggtgtgtactgagtcgtgaaggtacgcatataaaagtttggagtcgcgcgtcacgatatccacgcggagacgcgcctgcagcgttaagattgcgcggcttctttctgaacaacgatcgcgaacgaaacacaataagagcggtcactacaggcgacatgacccaagggcaacaaatagacgcattaacccaaatacttgaaacttaccccaactactctgtataacaacatgagcattttaaaagttgtagaagcgtgcaatttggcacacacttttttaaaattgggttatttatttagggccaagacttgtttggatatcgctttagataatttggaactattgcgtcgaaagactaacataaaagaagtggcagtcatgttaaacaagaaaactacagagtgtttgcaattgaaacgaaaaatagataaaaaaattgcacaacgtgttttaataaaaatttacactatcaaatgatgacatcataacgggttcaatattctgtgtgcaaaaataaatgacatcatatttcaaacttgttttacgcgtaaaattctactggtaaaacaagtttgagatatgatgtcatcatcacaaataatagtatgtaataaaataaacatatttgtgtgtaaatataatttattacaaataaattttacattgaatcaatctgtcttcgtgtttgttgtaaggtcttcgaatcttgtgtttcagcccctcgggatggtcaaaatgcgccgtagtaattgttaatggatctttcaacgattttttgcccatggcgagtgtgacaaacgcggccacgacaaacagcaggataatcagtttcatggtgttctatattcgacaatatatgggtcgcttctaaatcaccttgtccccaaaagcctcttttatagttttttagaacacgttgtgtattccaacagtaattgttccatctctttcaacagccattcagcatccggtcgttgactgtaatcatgctgaattaatttacaaacaatttcggtcaatttaggatggccttgggataaacttgccggcatttgctgtacattgtttctaaagttagttagcgtagtttcgcgttccaaagcagtcttgaagggcattatcaattcgaataaaacaatgcccaaactatacatgtcatttttgggggtgtacacttttttgatttgttctggtgcagcgtacaaagttatattttgagggttgtttttgataaacgttttgtatagactgccaaacatgccgcccacatacaaatcaaagtcgggcccagtcatgaaaatatcttcgggattaatattgtggtgcacgatatttacggaatgaatcgctttcacggcgctcaccaaatcaacaaacttgctaatataaaagccaaaatccgccggaactttaatgttggtctttgcaaaagtttgcaaattgcgttgtttcaaatagtcgctcaacatgtactcgtttagaggcgacgcaatatatatgcggtgctgccgcggattcaaataaaccaattgttcgggtttcatggtatacagttaagtgttaacgcgtcactaaattcagacacgagcgcacgccctatatacatacaatttatcgcacaagatgcttaacgcgatctgtttataaactaaaacgcactgcaataaattttagcaagcatttgtatttaatcaatcgaaccgtgcactgatataagaattaaaaatgggtttgtttgcgtgttgcacaaaatacacaaggctgtcgaccgacacaaaaatgaagtttccctatgttgcgttgtcgtacatcaacgtgacgctgtgcacctacaccgccatgttggtgggatacatggtaacattcaatgactccagcgaattgaaatatttacaatactggttgctgttgtcgtttttgatgtccgtggtgctaaacgctccgactctgtggacgatgctcaaaaccacagaagcccatgaagtaatttacgaaatgaagctgttccacgccatgtactttagtaacgtgctgttgaattatgtggtgtttttggacaatcaaatgggtacaaattttgtttttgttaacaatttaattcactgttgtgtactttttatgatatttgttgaattgcttatcctgttgggccacacaatgggcacgtacacggattatcaatatgtcaaatcgtgttatatggttatattgtttgtttcagttatgagtgttactattgttatgggtttagagtgtttgaaaacgaaactaattgataacagtttgatgtttaacgcgtttgtgtgcgctttgtacattgtgattgcaataatgtggtctttaaaaaataatttgactagttattacgtttcaaatttacaaagtattcaagttgttccgttttcatacaacgatccgccgccaccgttctctaacattgtaatggatgacataaaaaataaaaaataatttataaaaatgttttttattctttcacaattctgtaaattctaaacaaaaaatataaatacaaacttattatgttgtcgtctaaataaacatcaatttgtaaatctggacacctattcatatcattgatattacagtctactatacaacaattaaaactaaccaaattatctttacaacaattaaagcaattaaaacaatttaaataatcttcattgtcgtcgtataagtttatttgcactgtagacggtgttacacagcgatccattcgacgttcgtgttcgatcaactttctcgccaacttgtaccataaaaattgtttggacaaaaagttttccaacaatggtaacggccaattcaacgtgacgatgcgcacgtcctcgggtatgcatttgttaaaaaacacacagctcgctttaccaaacgaaagcaaaggtactaaatatggcgccattggctgatttgttattccaagataattacaaataaactgatccgtcgtggggtgataactggcaggtgtcagctttaaataatcttcaacgttgttgtcgcgcaaaagtctgcattttacacgcgttgttaatcccacgacttttgcatgtaaaatcggatccaaatactgcagaatcgtgtctataatttctaatggtaaacgtatgcgttttgctcgtgggcgctttgtaacgctcgacatcctaataacaactaacacaaaactaaaatgatactcaatatattgcttttacagttcatctttaggtttaaactgtgcgtttatcgcgttgagcaagtcgccgttatcggcatcaatctcccaagcaaacaggccgcccaatttatttcggtcgacatatttaacttttcctaacacagagtcgacgctgtcaaacgaaatcaaatcacctttacttttatcgaaaacgtacgacgcttgagcggcgctgtcaaacgtgtacacataattgttgagatctttttgaatttgacgataatctacaacaccgtcctcccacgtgcccgaccccggcccgttgccagtgccggaaaaatagttgtcattcgtataatttgttacgccggtccagccgcggccgtacatggcgacgcccacaattattttgttgggatcgacgccttgtttcagtaacgcatcgacagcgtagtgtgtagtgtatagctcttccgagttccaacttggcgcgtagactgttgtttggtagcccaaatccgtgtttgaccaagcccctttaaaatcgtaactcatgagaaatattttgcctaatgacttttgcgcttcggcgtagtttaccacggcaatcttgtcgtaacccgcgcttatagcgcttgttaattcgtaaaccctgccggtttgcgcttcgaggtcgtctagcattgcgcgcagctcctccaacaacaaaatgtatgttttggcgtcaccgtccgcatcgcccaacgacgggttagcccctttgccgcccggaaactcccaatcgatgtctacaccgtcaaagaatttccacacttgcagaaattccttaaccgaatctacaaaaacgtttcttttttcaacatcgtgcataaaataaaatgggtctgatagagtccagcctcctattgaaggaagaatttttaaatgggggtttgctaattttgccgccatcaactgtccaaaattgcctttatacggctcgttccaagcggacacacctttttggggtttttgtacggcggcccacggatcgtgaatggcaactttgaaatcttcgcgtcccttgcacgatctttgcaaagattcaaagcttccgggtatcgttttgagggcgtcgtttattccatcgccgccgcagatgggtatgaaaccatacaacaagtgtgataaatttggcaagggaactttgtctacgggaaagttgcgcccgtacacaccccactcaacaaagtacgcagcgacaattttatcctctctcctgccaggtttgttgttttccagccatgtgtattcgagcggtgccagatggccgccgtcggtgtctgcgactttgaccaacacgggatcgctcacggaacagccgtcctcattgcaaagtttgacacgcatgttaaattgcccgctcacaagaactttaatggtagcccttttactttcggcgtcgcctttccatacctgctgctcgtcaaacaacacgtacgctatgtcgccaatgtcgccgttccagacgttccaactgacttgaacgtcgacttgttctttaggctttattaaattttcgtaagcggtggcctcgtaatttatttctacgagcgcataattgcgatcggcccaatcgatcaccggcgtgccgggaatcgcgttagaaacggcgaccaaccacaaaacgtttaacaatttgtacaacattttaatttatcttaattttaagttgtaattattttatgtaaaaaaatgaacaaaattttgttttatttgtttgtgtacggcgttgtaaacagcgcggcgtacgaccttttgaaagcgcctaattattttgaagaatttgttcatcgattcaacaaagattatggtagcgaagttgaaaaattgcgaagattcaaaattttccaacacaatttaaatgaaattattaataaaaaccaaaacgattcggccaaatatgaaataaacaaattctcggatttgtccaaagacgaaactatcgcaaaatacacaggtttgtctttgcctattcagactcaaaatttttgcaaagtaatagtcctagaccagccaccgggcaaagggccccttgaattcgactggcgtcgtctcaacaaagtcactagcgtaaaaaatcagggcatgtgtggcgcctgctgggcgtttgccactctggctagtttggaaagtcaatttgcaatcaaacataaccagttgattaatctgtcggagcagcaaatgatcgattgtgattttgtcgacgctggctgtaacggcggcttgttgcacacagcgttcgaagccatcattaaaatgggcggcgtacagctggaaagcgactatccatacgaagcagacaataacaattgccgtatgaactccaataagtttctagttcaagtaaaagattgttatagatacattaccgtgtacgaggaaaaacttaaagatttgttacgccttgtcggccctattcctatggccatagacgctgccgacattgttaactataaacagggtattataaaatattgtttcaacagcggtctaaaccatgcggttcttttagtgggttatggtgttgaaaacaacattccatattggacctttaaaaacacttggggcacggattggggagaggacggatttttcagggtacaacaaaacataaacgcctgtggtatgagaaacgaacttgcgtctactgcagtcatttattaatctcaacacactcgctatttggaacataatcatatcgtctcagtagctcaaggtagagcgtagcgctctggatcgtatagatcttgctaaggttgtgagttcaagtctcgcctgagatattaaaaaactttgtaattttaaaaattttattttataatatacaattaaaaactatacaattttttattattacattaataatgatacaatttttattattacatttaatattgtctattacggtttctaatcatacagtacaaaaataaaatcacaattaatataattacaaagttaactacatgaccaaacatgaacgaagtcaatttagcggccaattcgccttcagccatggaagtgatgtcgctcagactggtgccgacgccgccaaacttggtgttctccatggtggttatgaggttgcttttttgttgggcaataaacgaccagccgctggcatctttccaactgtcgtgataggtcgtgttgccgatggtcgggatccaaaactcgacgtcgtcgtcaattgctagttccttgtagttgctaaaatctatgcattgcgacgagtccgtgttggccacccaacgcccttctttgtagatgctgttgttgtagcaattactggtgtgtgccggcggattggtgcacggcatcagcaaaaacgtgtcgtccgacaaaaatgttgaagaaacagagttgttcatgagattgccaatcaaacgctcgtccaccttggccacggagactatcaggtcgtgcagcatattgtttagcttgttgatgtgcgcatgcatcagctcaatgttcattttcagcaaatcgttttcgtacatcagctcctcttgaatatgcatcaggtcgcctttggtggcagtgtctccctctgtgtacttggctctaacgttgtggcgccaagtgggcggccgcttcttgactcggtgctcgactttgcgtttaatgcatctgttaaacttgcagttccacgtgtttttagaaagatcatatatatcattgtcaatcaaacagtgttcgcgtgtcaccgactcggggttatttttgtcatctttaatgagcagacacgcagcttttatttggcgcgtggtgaacgtagacttttgtttgagaatcatactcacgccgtctcgatgaagcacagtgtccacggtcacgttgatggggttgccctcagcgtccaaaatgtatacctggcactcgtccgtgtcgtcctggcactcgagcctgctgtacattttcgaagtggaaatgccgcatcgccacgatttgttgcacgtgtggtgcgcaaagtgattgttattctgccgcttcaccaactctttgcctttgacccactggccgcggccctcgttgtcgcgaaaacagtcgtcgctgtcactgccccaacggtcgatcagctcttcgcccacctcgcactgctgcctgatgctccacataagcaaatcctctttgcccacattcagcgttttcatggtttcttcgacgcgtgtgttgggatccagcgagccgccgttgtacgcatacgcctggtagtaccccttgtagccgataatcacgttttcgttgtagtccgtctccacgatggtgatttccacgtccttttgcagcgtttccttgggcggggtaatgtccaagtttttaatcttgtacggacccgtcttcatttgcgcgttgcagtgctccgccgcaaaggcagaatgcgccgccgccgccaaaagcacatataaaacaatagcgcttaccatcttgcttgtgtgttccttattgaagccttggtgtgactgatttactagtagcattgaggcatcttatatacccgaccgttatctggcctacgtgacacaaggcacgttgttagattaataatcttatctttttatcttaattgataagattatttttatctggctgttataaaaacgggatcatgaacacggacgctcagtcgacatcgaacacgcgcaacttcatgtactctcccgacagcagtctggaggtggtcatcattaccaattcggacggcgatcacgatggctatctggaactaaccgccgccgccaaagtcatgtcaccttttcttagcaacggcagttcggccgtgtggaccaacgcggcgccctcgcacaaattgattaaaaacaataaaaattatattcatgtgtttggtttatttaaatatctgtcaaattacaatttaaataataaaaagcgtcctaaagagtattacacccttaaatcgattattagcgacttgcttatgggcgctcaaggcaaagtatttgatccgctttgcgaagtaaaaacgcaactgtgtgcgattcaggagagtctcaacgaggctatttcgattttgaacgttcatagcaacgatgcggccgccaacccgcctgcgccagacattaacaagttgcaagaactgatacaagatttgcagtctgaatacaataaaaaaattacctttaccactgatacaattttggagaatttaaaaaatataaaggatttaatgtgcctgaataaataataataagggttttgtacgatttcaacaatgaacttttgggccacgtttagcatttgtctggtgggttatttggtgtacgcgggacacttgaataacgagctacaagaaataaaatcaatattagtggtcatgtacgaatctatggaaaagcatttttccaatgtggtagacgaaattgattctcttaaaacggacacgtttatgatgttgagcaacttgcaaaataacacgattcgaacgtgggacgcagttgtaaaaaatggcaaaaaaatatccaatctcgacgaaaaaattaacgtgttattaacaaaaaacggggtagttaacaacgtgctaaacgttcaataaacgcttatcactaagttaatatactaaaaatcacatagtcactacaatatttcaaaatatgaagccgacgaataacgttatgttcgacgacgcgtcggtcctttggatcgacacggactacatttatcaaaatttaaaaatgcctttgcaggcgtttcaacaacttttgttcaccattccatctaaacatagaaaaatgatcaacgatgcgggcggatcgtgtcataacacggtcaaatacatggtggacatttacggagcggccgttctggttttgcgaacgccttgctcgttcgccgaccagttgttgagcacatttattgcaaacaattatttgtgctacttttaccgtcgtcgccgatcacgatcacgctcacgatcacgctcgcgatcacgttctcctcattgcagacctcgttcgcgctctcctcattgcagacctcgttcgcgatctcggtcccggtctagatcgcggtcacgttcatcgtctcccaggcgagggcgtcgacaaatattcgacgcgctggaaaagattcgtcatcaaaacgacatgttgatgagcaacgtcaaccaaataaatctcaaccaaactaatcaatttttagaattgtccaacatgatgacgggcgtgcgcaatcaaaacgtgcagctcctcgcggcgttggaaaccgctaaagatgttattttgaccagattaaacacattgcttgccgagattacagactcgttacccgacttgacgtccatgttagataaattagctgaacaattgttggacgccatcaacacggtgcagcaaacctgcgcaacgagttgaacaacaccaactctattttgaccaatttagcgtcaagcgtcacaaacatcaacggtacgctcaacaatttgctagccgctatcgaaaacttagtaggcggcggcggcggtggcaattttaacgaagccgacagacaaaaactggacctcgtgtacactttggttaacgaaatcaaaaatatactcacgggaacgctgacaaaaaaataagcatgtccgacaaaacaccaacaaaaaagggtggcagccatgccatgacgttgcgagagcgcggcgtaacaaaacccccaaaaaagtctgaaaagttgcagcaatacaagaaagccatcgctgccgagcaaacgctgcgcaccacagcagatgtttcttctttgcagaaccccggggagagtgccgtttttcaagagttggaaagattagagaatgcagttgtagtattagaaaatgaacaaaaacgattgtatcccatattagatacgcctcttgataattttattgtcgcattcgtgaatccgacgtatcccatggcctattttgtcaataccgattacaaattaaaactagaatgtgccagaatcagaagcgatttactttacaaaaacaaaaacgaagtcgctatcaacaggcctaagatatcgtcttttaaattgcaattgaacaacgtaattttagacactatagaaactattgaatacgatttacaaaataaagttctcacaattactgcacctgttcaagatcaagaactaagaaaatccattatttattttaatattttaaatagtgacagttgggaagtaccaaagtatatgaaaaaattgtttgatgaaatgcaattggaacctcccgtcattttaccattaggtctttagatttggtaaggctagcacgtcgacatcatgtttgcgtcgttgacctcagagcaaaagctgttattaaaaaaatataaatttaacaattatgtgaaaacgatcgagttgagtcaagcgcagttggctcattggcgttcaaacaaagatattcagccaaaacctttggatcgtgcagaaattttacgtgtcgaaaaggccaccaggggacaaagcaaaaatgagctgtggacgctattgcgtttggatcgcaacacagcgtctgcatcgtccaactcgtccggcaacatgttacaacgaccagcgcttttgtttggaaacgcgcaagaaagtcacgtcaaagaaaccaacggcatcatgttagaccacatgcgcgaaatcatagaaagtaaaattatgagcgcggtcgttgaaacggttttggattgcggcatgttctttagccccttgggtttgcacgccgcttcgcccgatgcgtatttttctctcgccgacggaacgtggatcccagtggaaataaaatgtccgtacaattaccgagacacgaccgtggagcagatgcgtgtcgagttggggaacggcaatcgcaagtatcgcgtgaaacacaccgcgctgttggttaacaagaaaggcacgccccagttcgaaatggtcaaaacggatgcgcattacaagcaaatgcaacggcagatgtatgtgatgaacgcgcctatgggcttttacgtggtcaaattcaaacaaaatttggtggtggtttctgtgccgcgcgacgaaacgttctgcaacaaagaactgtctacggaaaacaacgcgtacgtggcgtttgccgtggaaaactccaactgcgcgcgctaccaatgcgccgacaagcgacggctttcattcaaaacgcacagctgcaatcacaactatagtggtcaagaaatcgatgctatggtcgatcgcggaatatatttagattatggacatttaaaatgtgcgtactgtgattttagctcagacagtcgggaaacgtgcgattctgttttaaaacgcgagcacaccaactgcaaaagttttaacttgaaacataaaaactttgacaatcctacatactttgattatgttaaaagattgcaaagtttgctaaagagtcaccactttagaaacgacgctaaaacacttgcctattttggttactatttaactcatacaggaaccctgaagaccttttgctgcggatcgcaaaactcgtcgcccaccaaacacgatcatttaaacgactgtgtatattatttggaaataaaataaacctttatattatatataattcttttatttatacatttgtttatacaattttatttacgacaaatattgactcgttgttcagaaagtttaataagcttgtcaatttcttcggcttgcaaagggctgccaacgcgttcgttttgaatgcgcgtaatccggtttacggtattgttggcgcgaacaataaactcctcaactggcaaattaacaattttgtttgcgtactcattgtgcactgcggccaggttttgtagaatgttttcgggaaaaatggcaattctattaaatttgacatgtttttgattgtatacatagttttgatattcttccagcgtaggatatttgtttaaactcttgacgcattcaatgtacaatttgtgcagtgacaaaattctgttaaaatccaaacgagaacatttctcaaaagttatttcttgaccgttgaaatgtacactttgcaattgtttcaataaactgtcgtaaaaagtttttccttcttcaagcacaaacgcggggcgcatcgtgttatctacaacgcttatgtacttgtcaaaatcttcaattatatgatagaaatacaaatatctctccgcgtttatggacgtgtcgtttaaaacatgttcgtcaacaactccgttatgatttactttcaaaaatttcaaatcttgcaaagcgtccgcgttggtcaacttgttgataataaatttgtctttgcattcaaacgctctgtttgcaatccactccacagcgtccaaaacggacatgcgtttaaacatgttgatacgttttagacaatacgctcgtttttttaccgcctcaacgttcacgtccgtgtagtcgcaccattgcaggatttgcaacatgtcctcggcaaaatgcgcgaactgccgcagcttttcctttccaaaatgttgattgtcgtgtttaaaaagcaacgttgaaatttccgagacataccacaaagccgtgggcaattttactttgatcagcggctccatagccaggttgctgaacccgatcatgcattccgtgttgttaatgcggtaaatgacatagcgtttaaagtagtcctttacattatcgtcaatgtattctgcgtcgtttatgtgcttgtacagcaaatagtacataaggcccgcgttaaacgcgacctttttagcgtcaaaatacgtgcacgccaacacgtaatcgttgtattcgtcgaattgctcgttgggcactatggcgcccgtaaaagggcgtctgctgcgcggtgacaaacgcgttccatgctgaatcaactgcttcaaactttccaaattataacaatattcaattgaatttttaatctctttattttggctccataaaagaggaaactcgagtcggcttttaaacttggtcaaactgccctgaattgtttcaaacaagttgtaatgtgttaacaatatggccggcacaccgctatcgttggctaaaatacaatcggggaatcgaatattttctacgttgctgtaatcgtacgcttcgtcgtcgtcgttggcaacaacatcgtcggtttcggcgttaacgctcgctaacttgttctgatagtgtaaatttttcattacatcaaaagcgtatgacttgttgcgattgtgcaaataatttatggccgtgctaatggtgctgtcgataattttatcaaaattgagaacatcggcgttatacaacgttttataaaattctgttgacttgaacgtgtttacaaactcatttttatttttaatctggtcaaaattcatactagaattgttagtttgtttgatttcgctgaatagccgctggcggagacgcttcagcttgtccacctcgtttaacacgttggcgtccgtcggcatggaattgataaatttgaaccgaacaaaagacagcagttcatcttttttcgatataaaattttcggttgtaatgatatcgtagttaaattctttggttaaattgacccattcgaccatttcatcgttgcgataaatcttgcagtccgagttgttgacaaacgccgaggcaacggacaaatcaatctgttccgtgttattattgatggcataaaacacaatgcgttcgaaactaaacggtttttcgtttagcaaatttttgcaaacgtttgcctcatttttggaaatttggccgtcggtcaccatgtacaaaagtttcaacttgccgtcgagcaagtttatattcttgtgaatccactttatgaattcgctgggcctggtgtcagtaccctcgccattgcggcgcaaataacgactcttgacgtctccgatttctttttggcggcaataagcactccaatgcaaatacaaaactttgtcgcaactactgatgttttcgatttcattctgaaattgttctaaagtttgtaacgcgttcttgttaaagtaatagtccgagtttgtcgacaaggaatcgtcggtggcgtacacgtagtagttaatcatcttgttgattgatatttaattttggcgacggatttttatatacacgagcggagcggtcacgttctgtaacatgagtgatcgtgtgtgtgttatctctggcagcgcgatagtggtcgcgaaaattacacgcgcgtcgtaacgtgaacgtttatattataaatattcaacgttgcttgtattaagtgagcatttgagctttaccattgcaaaatgtgtgtaatttttccggtagaaatcgacgtgtcccagacgattattcgagattgtcaggtggacaaacaaaccagagagttggtgtacattaacaagattatgaacacgcaattgacaaaacccgttctcatgatgtttaacatttcgggtcctatacgaagcgttacgcgcaagaacaacaatttgcgcgacagaataaaatcaaaagtcgatgaacaatttgatcaactagaacgcgattacagcgatcaaatggatggattccacgatagcatcaagtattttaaagatgaacactattcggtaagttgccaaaatggcagcgtgttgaaaagcaagtttgctaaaattttaaagagtcatgattataccgataaaaagtctattgaagcttacgagaaatactgtttgcccaaattggtcgacgaacgcaacgactactacgtggcggtatgcgtgttgaagccgggatttgagaacggcagcaaccaagtgctatctttcgagtacaacccgattggtaacaaagttattgtgccgtttgctcacgaaattaacgacacgggactttacgagtacgacgtcgtagcttacgtggacagtgtgcagtttgatggcgaacaatttgaagagtttgtgcagagtttaatattgccgtcgtcgttcaaaaattcggaaaaggttttatattacaacgaagcgtcgaaaaacaaaagcatgatctacaaggctttagagtttactacagaatcgagctggggcaaatccgaaaagtataattggaaaattttttgtaacggttttatttatgataaaaaatcaaaagtgttgtatgttaaattgcacaatgtaactagtgcactcaacaaaaatgtaatattaaacacaattaaataaatgttaaaatttattgcctaatattattttgtcattgcttgtcatttattaatttggatgatgtcatttgtttttaaaattgaactggctttacgagtagaattctacgcgtaaaacacaatcaagtatgagtcataatctgatgtcatgttttgtacacggctcataaccgaactggctttacgagtagaattctacttgtaatgcacgatcagtggatgatgtcatttgtttttcaaatcgagatgatgtcatgttttgcacacggctcataaactcgctttacgagtagaattctacgtgtaacgcacgatcgattgatgagtcatttgttttgcaatatgatatcatacaatatgactcatttgtttttcaaaaccgaacttgatttacgggtagaattctacttgtaaagcacaatcaaaaagatgatgtcatttgtttttcaaaactgaactcgctttacgagtagaattctacgtgtaaaacacaatcaagaaatgatgtcatttgttataaaaataaaagctgatgtcatgttttgcacatggctcataactaaactcgctttacgggtagaattctacgcgtaaaacatgattgataattaaataattcatttgcaagctatacgttaaatcaaacggacgttatggaattgtataatattaaatatgcaattgatccaacaaataaaattgtaatagagcaagtcgacaatgtggacgcgtttgtgcatattttagaaccgggtcaagaagtgttcgacgaaacgctaagccagtaccaccaatttcctggcgtcgttagttcgattattttcccgcaactcgtgttaaacacaataattagcgttttgagcgaagacggcagtttgctcacgttgaaactcgaaaacacttgttttaattttcacgtgtgcaataaacgctttgtgtttggcaatttgccagcggcggtcgtgaataatgaaacgaagcaaaaactgcgcattggagctccaatttttgccggcaaaaagctggtttcggtcgtgacggcgtttcatcgtgttggcgaaaacgaatggctgttaccggtgacgggaattcgagaggcgtcccagctgtcgggacatatgaaggtgctgaacggcgtccgtgttgaaaaatggcgacccaacatgtccgtctacgggactgtgcaattgccgtacgataaaattaaacagcatgcgctcgagcaagaaaataaaacgccaaacgcgttggagtcttgtgtgctattttacaaagattcagaaatacgcatcacttacaacaagggggactatgaaattatgcatttgaggatgccgggacctttaattcaacccaacacaatatattatagttaaataagaattattatcaaatcatttgtatattaattaaaatactatactgtaaattacattttatttacaatcatgtcaaagcctaacgttttgacgcaaattttagacgccgttacggaaactaacacaaaggttgacagtgttcaaactcagttaaacgggctggaagaatcattccagcttttggacggtttgcccgctcaattgaccgatcttaacactaagatctcagaaattcaatccatattgaccggcgacattgttccggatcttccagactcactaaagcctaagctgaaaacccaagcttttgaactcgattcagacgctcgtcgtggtaaacgcagttccaagtaaatgaatcgtttttaaaataacaaatcaattgttttataatattcgtacgattctttgattatgtaataaaatgtgatcattaggaagattacgaaaaatataaaaaatatgagttctgtgtgtataacaaatgctgtaaacgccacaattgtgtttgttgcaaataaacccagtattatttgattaaaattgttgttttctttgttcatagacaatagtgtgttttgcctaaacgtgtactgcataaactccatgcgagtgtatagcgagctagtggctaacgcttgccccaccaaagtagattcgtcaaaatcctcaatttcatcaccctcctccaagtttaacatttggccgtcggaattaacttctaaagatgccacataatctaataaatgaaatagagattcaaacgtggcgtcatcgtccgtttcgaccatttccgaaaagaactcgggcataaactctatgatttctctggacgtggtgttgtcgaaactctcaaagtacgcagtcaggaacgtgcgcgacatgtcgtcgggaaactcgcgcggaaacatgttgttgtaaccgaacgggtcccatagcgccaaaaccaaatctgccagcgtcaatagaatgagcacgatgccgacaatggagctggcttggatagcgattcgagttaacgctttggcagtcacggtcagcgttttgatggcgatcacgttgagcgagtgcactaacgcggctttgtaagtctctcccaacatgcgcacggtcacgcgccgagtcgtgctaagcaacatgtgtttcatggccggaatgagagaagtgttaatttttttcaacatgcttttaaacccggacattagcatatcaaagccaatgtccgtagcaataccgaaaacgagcgcgtaatcttccaaaaacgatgttataattgactccaagtcttggtcgctgattgaacggtcgagcgcctcgaaatgttcgacacgtgcacgttcgttaccgcggtaattgtatgcgatcggagttttagtaaagccggtttcggccgtgtacgtgatctggacgggcgacccgttgacgatcatgcccaaatcgtttagtgttggatttttgttaaaaagtttttcaaattccaagtctgtggcgttatcgcgcacgctgcgccattgcgctagtattgcgttggagtccacgttgggtcgtggcggtagtatgctggaaggcgctttgtaatcaaaatcgcgcagttcgctaaaaatgttgttggccagcattttgaaagtgacaaagatcgtgtcgcccagcacgaatccgatgagcgattcccaccatctaaacgaacaaccgccgttgaatagctctctgccgaaacgtcgacagtaggcttcgttgaattcgcctttaaagcgttcgggaaacaaggggtcgggatcgggccgaacgttaaaagccggcacatcgtccacgcccatgatcgtgtgttcttcggtgcgcaagtatgggctgttaaagtacattttggacagcgagtccactaagatgcatttgttgtcgagcgtgtatctaaactcggcagactgaacttgggtttcggcgccttcacgcatggccgccgccctgtccaggtggtagcacgcgggctgcgcgtaacccacgctagtctcggaggtctgcatgtacatgaacggcgtcgtgttggacacgacgccggtttcgtgaaacggatagcagctcatgcttacacacccgcgcttgctgaaagccagtttgacggccagcgctttgtcggccaatttcggcggcacataataatcgtcgtcacttgacgcgggacgcagcgtgtagtcgattagtatatgcggaaacctggtgcgccatctcgaaataaactcgagacgatgcatatgtatggcatacctactggcattagttaaatcgacggctgttaaaaccgccatgttatataggacttaaaataaacaacaatatataatgaaatatttattagattatattatagcaatacatttacatttattataacaatactttttatttaatctgattatattataacgatacatttttatttagacattgttatttacaatattaattaactttttatacatttttaaatcataatatataatcatttcgttgtgcatttcaaagcttttgatagcttcaaagtaatacatgaatttagagtattcaggaaaatgataaacgttggtaaacccgcatttggtacaatataacacgggatttttataatacagtttagtttttttacacaatttgcaatagttgttagttgtaggtttcaaaggaaacgtgattgcgccgtccaatacctgggtaaactttttgactttaacagtggcaaacacggttcctttgatacccgaaaatcggttgtcttgcagagcggccatcatttcgcttggctcttgaagtataaaacagttgacgtcatccaccacgtcgggtctggtgcacatgcttcggtagcgctgcaacactatattggtgtatgtttccctgagaacgagaccgccggtggtgctaagatcgattgtttgaatgcgctcgttgggctctttgtgatttcgaattatgcgccgaattatttcaaacactttgcagttgtgatcgtcaattctcaattctttaacttccgtcgtgtgctctaaacttacagggaaaatgtattggtaaaaaaacctctctctggctaaatagctgaggtcgaccaaattgatagaaggatatatttcgtacgaggtttttggaacgttgtgatatagatagcatttttgacagcagatgtctatgcggtcaggatcgtccaacggcttttcgatgtgaaccacaacatacaaaaaccattcgcgcgtgttgtctttgaatctataattgcaagtggtgcatcgcgaatcgctcatgtgctccatagtcttcttgtatttcacaggcctgcttgcaaatttgcccgtcatgcgcatatctttgctgtttatgtagcccataatgtaattggtggaaaattttagcgtggctttcatgatgtcgcgttctaaatcgctcatgaaatgcatacgtagatcgcgctcttgtttgaaatccagtttgtcgctgtacgcgggcaaaccttcaaacttgttcccaaactcgggcggcacaaaatatccatcttttctgttgacgactggttttttacttacaatgctgctgtgctccaacggcttggccggagaggtgcacataggctgtttaggcggagagatgcgcgtaggtggtttgatgttagattttggcggcggacgaacaggcgacggcggcgagttggcggcaggcgctggcaaagatttggcacgacccttgcccccggtccttggcgcgtcaaaaatgttattctctcgaaaaaaacggttcattgtaactgttagttagcactcagaaatcaacacgatactgtgcacgttcagccatcgagaggctttatatatggaaaccttatctatagagataagattgtatatgcgtaggagagcctggtcacgtaggcactttgcgcacggcactagggctgtggaggggacaggctatataaagcccgtttgcccaactcgtaaatcagtatcaattgtgctccggcgcacacgctcgcttgcgcgccggatagtataagtaattgataacgggcaacgcaacatgataagaaccagcagtcacgtgctgaacgtccaggaaaatataatgacgtcaaactgtgcgtcatcgccatattcgtgcgaggcaacgtccgcttgcgcagaagctcagcaggtaatgatcgataactttgttttctttcacatgtacaacgccgacatacaaattgacgcaaagctgcaatgcggcgtgcgctcggccgcgtttgcaatgatcgacgataaacatttggaaatgtacaagcatagaatagagaataaatttttttattactatgatcaatgtgccgacattgccaaacccgaccgtctgcccgatgacgacggcgcgtgctgtcaccattttatttttgatgcccaacgtattattcaatgtattaaagagattgaaagcgcgtacggcgtgcgtgatcgcggcaatgtaatagtgttttatccgtacttgaaacagttgcgagacgcgttgaagctaattaaaaactcttttgcgtgttgttttaaaattataaattctatgcaaatgtacgtgaacgagttaatatcaaattgcctgttgtttattgaaaagctggaaactattaataaaactgttaaagttatgaatttgtttgtagacaatttggttttgtacgaatgcaatgtttgtaaagaaatatctacggatgaaagatttttaaagccaaaagaatgttgcgaatacgctatatgcaacgcgtgctgcgttaacatgtggaagacggccaccacgcacgcaaaatgtccagcgtgcaggacatcgtataaataagcacgcaacgcaaaatgagtggtggcggcaacttgttgactctggaaagagatcattttaaatatttatttttgaccagctattttgatttaaaagataatgaacatgttccttcagagcctatggcatttattcgcaattacttgaattgcacgtttgatttgctagacgatgccgtgctcatgaactatttcaattacttgcaaagcatgcaattgaaacatttggtgggcagcacgtcgacaaacattttcaagtttgtaaagccacaatttagatttgtgtgcgatcgcacaactgtggacattttagaatttgacacgcgcatgtacataaaacccggcacgcccgtgtacgccacgaacctgttcacgtccaatccccgcaagatgatggctttcctgtacgctgaatttggcaaggtgtttaaaaataaaatattcgtaaacatcaacaactacggctgcgtgttggcgggcagtgccggtttcttgttcgacgatgcgtacgtggattggaatggtgtgcgaatgtgtgcggcgccgcgattagataacaacatgcatccgttccgactgtatctactgggcgaggacatggctaagcactttgtcgataataatatactaccgccgcacccttctaacgcaaagactcgcaaaatcaacaattcaatgtttatgctgaaaaacttttacaaaggtctgccgctgttcaaatcaaagtacacggtggtgaacagcactaaaatcgtgacccgaaaacccaacgatatatttaatgagatagataaagaattaaatggcaactgtccgtttatcaagtttattcagcgcgactacatattcgacgcccagtttccgccagatttgcttgatttgctaaacgaatacatgaccaaaagctcgatcatgaaaataattaccaagtttgtgattgaagaaaaccccgctatgagcggtgaaatgtctcgcgagattattcttgatcgctactcagtagacaattatcgcaagctgtacataaaaatggaaataaccaaccagtttcctgtcatgtacgatcatgaatcgtcgtacatttttgtgagcaaagactttttgcaattgaaaggcactatgaacgcgttctacgcgcccaagcagcgtatattaagtattttggcggtgaatcgtttgtttggcgccacggaaacgatcgactttcatcccaacctgctcgtgtaccggcagagttcgccgccggtccgtttgacgggcgacgtgtatgttgttgataagaacgaaaaagtttttttggtcaaacacgtgttctcaaacacggtgcctgcatatcttttaataagaggtgattacgaaagttcgtctgacttgaaatcccttcgcgatttgaatccgtgggttcagaacacgcttctcaaattattaatccccgactcggtacaataatatgatttacactgatcccactactggcgctacgactagcacagacgtcgtccgtccacaaactatttaaacaggctaactccaaacatgttcttgaccatcttggctgtagtagtaattattgctttaataattatatttgttcaatctagcagtaatggaaacagctcggggggtaatgtacctccaaacgccctggggggttttgtaaatcctttaaacgctaccatgcgagctaatccctttatgaacacgcctcaaaggcaaatgttgtagataagtgtataaaaaatgaaacgtatcaaatgcaacaaagttcgaacggtcaccgagattgtaaacagcgatgaaaaaatccaaaagacctacgaattggctgaatttgatttaaaaaatctaagcagtttagaaagctatgaaactctaaaaattaaattggcgctcagcaaatacatggctatgctcagcaccctggaaatgactcaaccgctgttggaaatatttagaaacaaagcagacactcggcagattgccgccgtggtgtttagcacattagcttttatacacaatagattccatccccttgttactaattttactaacaaaatggagtttgtggtcactgaaaccaacgacacaagcattcccggagaacccattttgtttacggaaaacgaaggtgtgctgctgtgttccgtggacagaccgtctatcgttaaaatgctaagccgcgagtttgacaccgaggctttagtaaactttgaaaacgacaactgcaacgtgcggatagccaagacgtttggcgcctctaagcgcaaaaacacgacgcgcagcgatgattacgagtcaaataaacaacccaattacgatatggatttgagcgattttagcataactgaggttgaagccactcaatatttaactctgttgctgaccgtcgaacatgcctatttacattattatatttttaaaaattacggggtgtttgaatattgcaaatcgctaacggaccattcgctttttaccaacaaattgcgatcgacaatgagcacaaaaacgtctaatttactgttaagcaaattcaaatttaccattgaagattttgacaaaataaactcaaattctgtaacatcagggtttaatatatataattttaataaataattaaataatatacaatgtttttattaattatatttttaatattaattaaaagtattaatatttaaaaaaatgaatcaaattcatctaaagtgtcacagcgataaaatttgtcctaaagggtattttggcctcaacgccgatccctatgattgcacggcgtattatctgtgtccgcataaagtgcaaatgttttgcgaattaaatcacgaatttgacttggactccgccagctgcaagcctatcgtgtacgatcacacgggcagcgggtgtacggctcgcatgtatagaaacttgttactatgaagagcgggtttccagttgcacaacactattatcgatttgcagttcgggacataaatgtttaaatatatcgatgtctttgtgatgcgcgcgacatttttgtaggttattgataaaatgaacggatacgttgcccgacattatcattaaatccttggcgtagaatttgtcgggtccattgtccgtgtgcgctagcatgcccgtaacggacctcgtacttttggcttcaaaggttttgcgcacagacaaaatgtgccacacttgcagctctgcatgtgtgcgcgttaccacaaatcccaacggcgcagtgtacttgttgtatgcaaataaatctcgataaaggcgcggcgcgcgaatgcagctgatcacgtacgctcctcgtgttccgttcaaggacggtgttatcgacctcagattaatgtttatcggccgactgttttcgtatccgctcaccaaacgcgtttttgcattaacattgtatgtcggcggatgttctatatctaatttgaataaataaacgataaccgcgttggttttagagggcataataaaagaaatattgttatcgtgttcgccattagggcagtataaattgacgttcatgttggatattgtttcagttgcaagttgacactggcggcgacaagatcgtgaacaaccaagtgactatgacgcaaattaattttaacgcgtcgtacaccagcgcttcgacgccgtcccgagcgtcgttcgacaacagctattcagagttttgtgataaacaacccaacgactatttaagttattataaccatcccaccccggatggagccgacacggtgatatctgacagcgagactgcggcagcttcaaactttttggcaagcgtcaactcgttaactgataatgatttagtggaatgtttgctcaagaccactgataatctcgaagaagcagttagttctgcttattattcggaatcccttgagcagcctgttgtggagcaaccatcgcccagttctgcttatcatgcggaatcttttgagcattctgctggtgtgaaccaaccatcggcaactggaactaaacggaagctggacgaatacttggacaattcacaaggtgtggtgggccagtttaacaaaattaaattgaggcctaaatacaagaaaagcacaattcaaagctgtgcaacccttgaacagacaattaatcacaacacgaacatttgcacggtcgcttcaactcaagaaattacgcattattttactaatgattttgcgccgtatttaatgcgtttcgacgacaacgactacaattccaacaggttctccgaccatatgtccgaaactggttattacatgtttgtggttaaaaaaagtgaagtgaagccgtttgaaattatatttgccaagtacgtgagcaatgtggtttacgaatatacaaacaattattacatggtagataatcgcgtgtttgtggtaacttttgataaaattaggtttatgatttcgtacaatttggttaaagaaaccggcatagaaattcctcattctcaagatgtgtgcaacgacgagacggctgcacaaaattgtaaaaaatgccatttcgtcgatgtgcaccacacgtttaaagctgctctgacttcatattttaatttagatatgtattacgcgcaaaccacatttgtgactttgttacaatcgttgggcgaaagaaaatgtgggtttcttttgagcaagttgtacgaaatgtatcaagataaaaatttatttactttgcctattatgcttagtcgtaaagagagtaatgaaattgagactgcatctaataatttctttgtatcgccgtatgtgagtcaaatattaaagtattcggaaagtgtgcagtttcccgacaatcccccaaacaaatatgtggtggacaatttaaatttaattgttaacaaaaaaagtacgctcacgtacaaatacagcagcgtcgctaatcttttgtttaataattataaatatcatgacaatattgcgagtaataataacgcagaaaatttaaaaaaggttaagaaggaggacggcagcatgcacattgtcgaacagtatttgactcagaatgtagataatgtaaagggtcacaattttatagtattgtctttcaaaaacgaggagcgattgactatagctaagaaaaacaaagagttttattggatttctggcgaaattaaagatgtagacgttagtcaagtaattcaaaaatataatagatttaagcatcacatgtttgtaatcggtaaagtgaaccgaagagagagcactacattgcacaataatttgttaaaattgttagctttaatattacagggtctggttccgttgtccgacgctataacgtttgcggaacaaaaactaaattgtaaatataaaaaattcgaatttaattaattatacatatattttgaatttaattaattatacatatattttatattatttttgtcttttattatcgaggggccgttgttggtgtggggttttgcatagaaataacaatgggagttggcgacgttgctgcgccaacaccacctcctcctcctcctttcatcatgtatctgtagataaaataaaatattaaacctaaaaacaagaccgcgcctatcaacaaaatgataggcattaacttgccgctgacgctgtcactaacgttggacgatttgccgactaaaccttcatcgcccagtaaccaatctagacccaagtcgccaactaaatcaccaaacgagtaaggttcgatgcacatgagtgtttggcccgcaggaagatcgctaatatctacgtattgaggcgaatctgggtcggcggacggatcgctgccgcgacaaactgttttttctacttcatagttgaatccttggcacatgttggttagttcgggcggattgttaggcaacaaggggtcgaatgggcaaatggtaacatccgactgatttagattggggtcttgacgacaagtgcgctgcaataacaagcaggcctcggcgatttctccggcgtctttaccttgcacataataacttccgccggtgttattgatggcgttgattatatcttgtactagtgtggcggcgctaaacaagaaatagccgccggtggccaagagtatgcccgttcctcctacttttaagctttgcatgtaactatgtagacgggggttttgctgcagtgcgttttgaacaccttcgggcgtgcgcacgttggtttccgggaagttttgtttgactgcattggatcgcgtctgcttggtgtggtaattaaagtctggcacgttgtccacgcgccgcaattggctcaatgagtttatttgagggtctgaaatgccctgaaatactccgcgtatgttggggacatcattgttacgagtaattctgtttatgtctgaagtgctcacaaactggttgttagatagttgatagcccggctgaaatctgttgtttccaatgttgcgtacactgggcgcgttgagcacatttgtgaaaccggcgggagtgcttgttaaaagacgcgtattatcagtaataaaactggcctgattaggatacaatttattgactgcgcgaagatttgaaaaaaaactcattttaaagcaaacttatttaataaatatatcacagtaaaggttttgcaaaactgccgtcgtcaatacaacacggcagcggcgtcatgttggtaaaatctaatcttctccttgctttagattctgggcgagaaggcgcatttgttgtgtaagttatttcgacgtctgcattatttgttgtgtaaggtatctcgacgtatgaagcaactttaacattgttataattttttttaaatattgatgcgctccacggcgcgcgttgatacggatgatatctctccattgtatgatcgctaaatttatataccgtttcaataaatatgttaaaacccaacatgttaattataatattcataatagtttgtttgttttcaataattatttttactgttttgaaatctaaaagaggtgacgatgacgaatcagacgacgggttcagttgctataacaaaccaattggagtaaattttccgcatcctactagatgtgacgctttctacatgtgtgtcggtttaaatcaaaaattagagttaatctgccctgaaggatttgaatttgatccagatgttaaaaattgtgttcctatatcagattatggatgtaccgctaaccaaaactaaaaataaaataaaatttatatagattaatgaaataaaatttatatagattaataaaataaaatttatttaatatattatactatttatattatttacaacacttaacgtctagacataacagtttgtaacttagaaactaaatcagagttactgcgctcaaactctgaaaatttggcttgagactcggccacctgcttacgcaattgttcttgcagattattcacagtcgattgcaactcttctgatttcttggtagattcttgcaagtcatagtttgccttttgtaaatctaattcggcgacagcatgcttgtgtttaagcataatgtagtcgctgtttaacatggtcattttatgttcaacttggctggtcttggctcgcagctcggacagttctttttgcaattgctccacatagttcaagtccgtggtgtgattgttgaccgtgttattttctaaaagctcgcgccaatgctgtttgatggaatcctggttacgagtgacgttaatgggcataaattctacatacccgtgcttattgtacacgcgacaatctgatgaagtagcgctgcaaaaacatttgtacacagaattgtccataattatcttgacataacacttgaaacacacagcatggttacaatgaatcgaagtcacaaacgaggaatttacgtttttagtgtctttaaaagtagtaaaacaaatattacacgaaacctctacttcttcttcgggttctgattgctgctgctgctgctgctgcggctgcggagactgcggcgaggcaaacaaatctggcgactgtggtattacgtaattcggcgaataagatggactataagtgggagaccttggggcaatctcattcatcagctgagcctcaagatctaaacctcgttgcagagccctctgcgcagctgtctccgacgcaatgttatcctggtactgctgggcagtgatgtcgggaaaccgttcacgatccacattttcactattaattagtatgacgtcatcctcttgacttaatagcggatcgtcattgctaatgttaacctgaccgtgcacgtaatacgtgacaccctgacgatggtaggtgcgcgtcaacggctcgttgacgttcccgataatctgcacgttttcttcgctgacacgctgctcctgacgccgctcctgacggcgatggctgcgactgcttgaagacggctggctgcgactgcttgaagacggctgggcttcgggagatgttgtaaagttgatgcggcgacggctgagagacagcctgtggcggcggctgctgctgggagtggcggcgttgatttggcgactcatggctgggctggtaggatactgttcactaggctgtgaggcttgaactgtgcttacgagtagaacggcagctgtatttatactgtttatcagtactgcacgactgataagacaatagtggtgggggaacttgccaggcaaaaatgaacttttttgtaatgcaaaaaagttgatagtgtagtagtatattgggagcgtatcgtacagtgtagactattctaataaaatagtctacgatttgtagagattgtactgtatatggagtgtcaggcaaaagtgaacttttttgcattgcaaaaaaattcattttaaatttatcatatcacaggctgcagtttctgttatctgtcccccactcaggcgtgcagctataaaagcaggcactcaccaactcgtaagcacagttcgttgtgaagtgaacacggagagcctgccaataagcaaaatgccaagggacaccaacaatcgccaccggtctacgccatatgaacgtcctacgcttgaagatctccgcagacagttgcaagacaatttggacagcataaaccgccgagacagaatgcaagaagaacaagaagaaaacctgcgctatcaagtgcgtagaaggcagcgtcaaaaccagctccgctccatacaaatggaacagcagcgaatgatggcggaattaaacaacgagccggtgattaattttaaatttgagtgtagtgtgtgtttagaaacatattcccaacaatctaacgatacttgtccttttttgattccgactacgtgcgaccacggtttttgtttcaaatgcgtcatcaatctgcaaagcaacgcgatgaatattccgcattccactgtgtgctgtccattgtgcaatacccaggtaaaaatgtggcgttccttaaagcctaacgctgttgtgacgtgtaagttttacaagaaaactcaagaaagagttccgcccgtgcagcagtataaaaacattattaaagtgctacaagaacggagcgtgattagtgtcgaagacaacgacaataattgtgacataaatatggagaatcaggcaaagatagctgctttggaagctgaattggaagaagaaaaaaatcacagtgatcaagtagcttctgaaaaccgacagctgatagaagaaaatactcgtctcaatgaacagattcaagagttgcagcatcaggtgaggacattggtgccgcaacgtggcattacggttaatcagcaaattggccgtgacgacagtgcgccagccgagctgaacgagcgttttcgctcacttgtctattcgactatttcagagctgtttattgaaaatggcgttcatagtattcaaaattatgtttatgccggaacttctgctgctagttcatgtgatgtaaatgttactgttaattttgggtttgaaaattaatgtgatatgaaatgtatatataaaaatgatggaataaataataaacatttttatactttttatgttttttttatttcatgtgattaagaaacttttaagatggatagtagtaattgtattaaaatagatgtaaaatacgatatgccgttacattatcaatgtgacaataacgcagataaagacgttgtaaatgcgtatgacactatcgatgttgaccccaacaaaagatttataattaatcataatcacgaacaacaacaagtcaatgaaacaaataaacaagttgtcgataaaacattcataaatgacacagcaacatacaattcttgcataataaaaatttaaatgacatcatatttgagaataacaaatgacattatccctcgattgtgttttacaagta

SEQ ID NO: 2 - DNA, 134417 bp, Plutella xylostella multiple nucleopolyhedrovirus
gaattctacccgtaaagcgagtttagttttgaaaaacaaatgacatcatttgtataatgacatcatcccctgattgtgttttacaagtagaattctatccgtaaagcgagttcagttttgaaaacaaatgagtcatacctaaacacgttaataatcttctgatatcagcttatgactcaagttttgagccgtgtgcaaaacatgagataagtttatgacatcatccactgatcgtgcgttacaagtagaattctactcgtaaagcgagttcggttatgagccgtgtgcaaaacataacatcagcttatgactcttgattgtgttttacaagtagaattctactcgtaaagcgagttcggttatgagccgtgtgcaaaacatgacatcagcttatgagtcataattaatcgtgcgttacaagtagaattctactcgtaaagcgagttgaaggatcatatttagttgcgtttatgagataagattgaaagcgcgtgtaaaatgtttcccgcgcgttggcacaactatttacaatgcggccaagttataaaagattctaatctgatatgttttaaaacacctttgcggcccgagttgtttgcgtacgtgactagcgaagaagatgtgtggaccgcagaacagatagtaaaacaaaaccctagtattggagcaataatcgatttaactaacacgtctaaatattatgatggtgtgcattttttgcgggcgggcctgttatacaaaaaaattcaagtacctggccagactttgccgcctgaaagcatagttcaagaatttattgacacggtaaaagaatttacagaaaagtgtcccggcatgttggtgggcgtgcactgcacacacggtattaatcgcaccggttacatggtgtgcagatatttaatgcacaccctgggtattgcgccgcaggaagccatagatagattcgaaaaagccagaggtcacaaaattgaaagacaaaattacgttcaagatttattaatttaattaatattatttgcattctttaacaaatactttatcctattttcaaattgttgcgcttcttccagcgaaccaaaactaatgcttcgcttgctccgtttagcttgtagccgatcagtggcgttgttccaatcgacggtaggattaggccggatattctccaccacaatgttggcaacgttgatgttacgtttatgcttttggttttccacgtacgtcttttggccggtaatagccgtaaacgtagtgccgtcgcgcgtcacgcacaacaccggatgtttgcgcttgtccgcggggtattgaaccgcgcgatccgacaaatccaccactttggcaactaaatcggtgacctgcgcgtcttttttctgcattatttcgtctttcttttgcatggtttcctggaagccggtgtacatgcggtttagatcagtcatgacgcgcgtgacctgcaaatctttggcctcgatctgcttgtccttgatggcaacgatgcgttcaataaactcttgttttttaacaagttcctcggttttttgcgccaccaccgcttgcagcgcgtttgtgtgctcggtgaatgtcgcaatcagcttagtcaccaactgtttgctctcctcctcccgttgtttgatcgcaggatcgtacttgccggtgcagagcacttgaggaattacttcttctaaaagccattcttgtaattctatggcgtaaggcaatttggacttcataatcagctgaatcacgccggatttagtaatgagcactgtatgcggctgcaaatacagcgggtcgccccttttcacgacgctgttagaggtagacccgtcgtcatgacgggtctgctcatatgtaattttgtatttagcatcaactatttttctagcggcttgatcacaatctgcgtattttaaactgttagcgacgtccttggccacgaacctgacctgttggtcgcgctctagcacgtaccgcaggttgaacgtatcttctccaaatttaaattgtccaatttgaacgcgagccatttttaatacacgtgtgtcgattttgcaacaactaaacttattgtggtaagcaataattaaatatgggggaacatgcgccgctacaacactcgtcgttatgaacgcagacggcgccggtctcggcgcaagcggctaaaacgtgttgcgcgttcaacgcggcaaacatcgcaaaagccaatagtacagttttgatttgcatattaacggcgattttttaaattatcttatttaataaatagttatgacgcctacaactccccgcccgcgttgactcgctgcacctcgagcagttcgttgacgccttcctccgtgtggccgaacacgtcgagcgggtggtcgatgaccagcggcgtgccgcacgcgacgcacaagtatctgtacaccgaatgatcgtcgggcgaaggcacgtcggcctccaagtggcaatattggcaaattcgaaaatatatacagttgggttgtttgcgcatatctatcgtggcgttgggcatgtacgtccgaacgttgatttgcatgcaagccgaaattaaatcattgcgattagtgcgattaaaacgttgtacatcctcgtttttaatcatgccgtcgattaaatcgcgcaatcgagtcaagtgatcaaagtgtggaataatgttttctttgtattcccgagtcaagcgcagcgcgtattttaacaaactagccatcttgtaagttagtttcatttaatgcaactttatccaataatatattatgtatcgcacgtcaagaattaacaatgcgcccgttgtcgcatctcaacacgactatgatagagatcaaataaagcgcgaattaaatagcttgcgacgcaacgtgcacgatctgtgcacgcgttccggcacgagctttgattgtaataagtttttacgaagcgatgacatgacccccgtagtgacaacgatcacgcccaaaagaactgccgactacaaaattaccgagtatgtcggtgacgttaaaactattaagccatccaatcgaccgttagtcgaatcaggaccgctggtgcgagaagccgcgaagtatggcgaatgcatcgtataacgtgtggagtccgctcattagagcgtcatgtttagacaagaaagctacatatttaattgatcccgatgattttattgataaattgaccctaactccatacacggtattctacaatggcggggttttggtcaaaatttccggactgcgattgtacatgctgttaacggctccgcccactattaatgaaattaaaaattccaattttaaaaaacgcagcaagagaaacatttgtatgaaagaatgcgtagaaggaaagaaaaatgtcgtcgacatgctgaacaacaagatcaatatgcctccgtgcataaaaaaaatattgggcgatttgaaagaaaacaatgtaccgcgcggcggtatgtacaggaagaggtttatactaaactgttacattgcaaacgtggtttcgtgtgccaagtgtgaaaaccgatgtttaatcaaggctctgacgcatttctacaaccacgactccaagtgtgtgggtgaagtcatgcatcttttaatcaaatcccaagatgtgtataaaccaccaaactgccaaaaaatgaaaactgtcgacaagctctgtccgtttgctggcaactgcaagggtctcaatcctatttgtaattattgaataataaaacaattataaatgtcaaatttgttttttattaacgatacaaaccaaacgcaacaagaacatttgtagtattatctataattgaaaacgcgtagttataatcgctgaggtaatatttaaaatcattttcaaatgattcacagttaatttgcgacaatataattttattttcacataaactagacgccttgtcgtcttcttcttcgtattccttctctttttcatttttctcctcataaaaattaacatagttattatcgtatccatatatgtatctatcgtatagagtaaattttttgttgtcataaatatatatgtcttttttaatggggtgtatagtaccgctgcgcatagtttttctgtaatttacaacagtgctattttctggtagttcttcggagtgtgttgctttaattattaaatttatataatcaatgaatttgggatcgtcggttttgtacaatatgttgccggcatagtacgcagcttcttctagttcaattacaccattttttagcagcaccggattaacataactttccaaaatgttgtacgaaccgttaaacaaaaacagttcacctcccttttctatactattgtctgcgagcagttgtttgttgttaaaaataacagccattgtaatgagacgcacaaactaatatcacaaactggaaatgtctatcaatatatagttgctgatatcatggagataattaaaatgataaccatctcgcaaataaataagtattttactgttttcgtaacagttttgtaataaaaaaacctataaatatgccggattattcataccgtcccaccatcgggcgtacctacgtgtacgacaacaagtactacaaaaatttaggtgccgttatcaagaacgctaagcgcaagaagcacttcgccgaacatgagatcgaagaggctaccctcgaccccctagacaactacctagtggctgaggatcctttcctgggacccggcaagaaccaaaaactcactctcttcaaggaaatccgtaatgttaaacccgacacgatgaagcttgtcgttggatggaaaggaaaagagttctacagggaaacttggacccgcttcatggaagacagcttccccattgttaacgaccaagaagtgatggatgttttccttgttgtcaacatgcgtcccactagacccaaccgttgttacaaattcctggcccaacacgctctgcgttgcgaccccgactatgtacctcatgacgtgattaggatcgtcgagccttcatgggtgggcagcaacaacgagtaccgcatcagcctggctaagaagggcggcggctgcccaataatgaaccttcactctgagtacaccaactcgttcgaacagttcatcgatcgtgtcatctgggagaacttctacaagcccatcgtttacatcggtaccgactctactgaagaggaggaaattctccttgaagtttccctggtgttcaaagtaaaggagtttgcaccagacgcacctctgttcactggtccggcgtattaaaacacgatacattgttattagtacatttattaagcgctagattctgtgcgttgttgatttacagacaattgttgtacgtattttaataattcattaaatttataatctttagggtggtatgttagagcgaaaatcaaatgattttcagcgtctttatatctgaatttaaatattaaatcctcaatagatttgtaaaataggtttcgattagtttcaaacaagggttgtttttccgaaccgatggctggactatctaatggattttcgctcaacgccacaaaacttgccaaatcttgtagcagcaatctagctttgtcgatattcgtttgtgttttgttttgtaataaaggttcgacgtcgttcaaaatattatgcgcttttgtatttctttcatcactgtcgttagtgtacaattgactcgacgtaaacacgttaaataaagcttggacatatttaacatcgggcgtgttagctttattaggccgattatcgtcgtcgtcccaaccctcgtcgttagaagttgcttccgaagacgattttgccatagccacacgacgcctattaattgtgtcggctaacacgtccgcgatcaaatttgtagttgagctttttggaattatttctgattgcgggcgtttttgggcgggtttcaatctaactgtgcccgattttaattcagacaacacgttagaaagcgatggtgcaggcggtggtaacatttcagacggcaaatctactaatggcggcggtggtggagctgatgataaatctaccatcggtggaggcgcaggcggggctggcggcggaggcggaggcggaggtggtggcagtgatgcagacggcggtttaggctcaaatgtctctttaggcaacacagtcggcacctcaactattgtactggtttcgggcgccgtttttggtttgaccggtctgagacgagtgcgatttttttcgtttctaatagcttccaacaattgttgtctgtcgtctaaaggtgcagcgggttgaggttccgtcggcattggtggagcgggcggcaattcagacatcgatggtggtggtggtggtggaggcgctggaatgttaggcacgggagaaggtggtggcggcggtgccgccggtataatttgttctggtttagtttgttcgcgcacgattgtgggcaccggcgcaggcgccgctggctgcacaacggaaggtcgtctgcttcgaggcagcgcttggggtggtggcaattcaatattataattggaatacaaatcgtaaaaatctgctataagcattgtaatttcgctatcgtttaccgtgccgagatttaacaaccgctcaatgtaagcaattgtattgtaaagagattgtctcaagctcgaatcccgcacgccgataacaagccttttcatttttaccacagcattgtagtgacgagacacttcgctgtcgtcgacgtacatgtatgctttgttgtcaaaaacgtcgttggcaagctttaaaatatttaaaagaacatctctgtttagcaccactgtgttgtcgtaaatgttgtttttgataatttgcgcttccgcagtatcgacacgttcaaaaaattgatgcgcatcaattttgttgttcctattattgaataaataagattgtacagattcatatctacgattcgtcatggccaccacaaatgctacgctgcaaacgctggtacaattttacgaaaactgcaaaaacgtcaaaactcggtataaaataatcaacgggcgctttggcaaaatatctattttatcgcacaagcccactagcaaattgtatttgcagaaaacaatttcggcgcacaattttaacgctgacgaaataaaagttcaccagttaatgagcgaccacccaaattttataaaaatctattttaatcacggttccatcaacaaccaagtgatcgtgatggactacatcgactgtcccgatttatttgaaacactacaaattaaaggcgagctttcgtgccaacttgttagcaatattattagacagctgtgtgaagcgctcaacgatttgcacaagcacaatttcatacacaacgacataaaactcgaaaatgtcttatatttcgaagcacttgatcgcgtgtatgtttgcgattacggattgtgcaaacacgaaaactcacctagcgtgcacgacggcacgttggagtattttagtccggaaaaaattcgacaccacaactatgcacgttcgtttgactggtacgccgtcggcgtgttaacatacaagttgctaaccggcggccgacacccatttgaaaaaagcgaagacgaaatgttggacttgaatagcatgaagcgtcgtcagcaatacaatgacattggcgttttaaaacacgttcgtaacgttaacgctcgtgactttgtgtactgcctaacaagatacaacatagattgtagactcacaaattacaaacaaattataaaacatgagtttttgtcgtaaaaatgccacttgttttacgagtagaattctacgtgtaacacacgatctaaaagatgatgtcattttttatcaatgactcatttgttttaaaacagacttgttttacgagtagaattctacgtgtaaagcatgatcgtgagtggtgttaataaaatcataaaaattattgtaaatgtttattatttaaaaacgattcaaatatataataaaaacaatctacatctatttcttcacaatccataacacacaacaggtccattaatgagtttttgtctttatccgacatactatgtgcatgtaacaaatcaaatacatcttttaaatttttatacacatctttacattgtctaccaaaatctttaataactctataacaaggaaaagacttttcttcttgcgtggttttgccgcgcagatattgaaataaaatgtgcatgcacgacaacttgtgtttactaaaatgctccttgcctataccgcaaaaccggccatacatttcggcgattacacgcggacaattgtacgattcgtctacgtgtaaacgatcatcataatcactcttgcgcaaacgaataaattttttcaccgcttccgacaaacgaggcaccaattcggcgggcacgcttcgatacattattctgtgcacataagttaccacacaaaatttattgtaccaccatccgacaacgccgttattagggttgaacacgttggcgatgcgcagcagtttcccgtttctcatgaaatattcaaagcggcccaaaataatttgcaagcagtccaacatgtcttgagaaatttctcgttgaaaattgttcaaagagaatatctgccatccgttttgaacgcgcacgctgacgggaaccaccgcatcgatttgctccaacacttcacggacgttatcgtcgatgcccatcgtttcgctggtgctgaaccaatgggaaaggcttttgatggaatcgcccgcgtctatcatcttgaccgcttcgtcaaaggtgcaactgccgctcttcaaacgccgcatagcggtcacgtcccgctctatgcacgacataccgtttacgtacgattctgataggtattcctgaactatacggtaatggtgatacgactcgccatacacgtcgtgcacctcattgtatttagcataataattgtaaattattaactttgcagcgagagacatgttgtcggtaaagcggtgctaggctcaataatactgatgtacaggcacgcgtgctatttatatataatttcgcaaggaggggagctgttatcggttgctattttaaagaatggccgtctgtttttatcacaagcttggcagcctcaaccatgaagcgtcgtcattgtaaattaaattctctgcctcaagaattatttgacaagattgtcgagtatttatctttatctgattactgcaatttggtgcttgtctgtaaaagaccttctagtaaatataacgtgatatttgatagtactaatcaccaacatttgaaaggcgtgtacaaaaagacagacgtgcaaataacaagctacaacgaatacatcaactgtatatgcaacgaactgagacaagacgaattctatgccaaatcatggattgcgagtatttgcggtcaccagatagcgacaatttttagtgtaacaaataaacaagtagaaatgaaatatcatttgtataatatagcaattgtggaaagtgaagattgcaacggattttacccatttgagccaacgcgcaattgtttaatatgcaaacaaaaaaaccaatgtcctcgtaattcatttattgtttcgttgtgtaaatatttagaaaaacaaaatgtacattcaaactttatatattatttatacgaaataaatacataataaaaattattatacatgttttattttacaatacttcttgtataacctctctaactacattaggagtacaatccacgtcaattacacgtttagctatttttctaattttgtaatgtttatcgtagagtttttcgttaatacattgaatagccaacaagggatttgggtgcacaccgtcatagagcacttccatgtcgtcttcaaagcgcatttttcgcttgcgaaaatgccgctcttggcccaaaacaaaagcgagtttgatgcggtcgtcgatgcgttccgaaaatacggccaaatgttggtgtttggtgatgtcgcgcggaaacgtcaccgtgccatttttgctttccgccacgacggcggttttcaatttttcggccgactgcagcatgttaagtttggcgtcgagttcgtgcaaacgcaattcaaactgctcaaacctgttgcccacctcattcttgaacgtctcgtgggtgaccataaatttttcgctgtttgcattcagtttctttacatgttttaaaacagattcaatcttgtcgcgcaaatcatcacgctcgccttcagtttgaatgtgcagcaacgcgttgcttttgttggcaaaatttaaccgcatcaaaatttccaacaacccgtgcttagtcgcgaacaatgcgcccaacgagttgagatcacgtttggatctctgcttgtgaaaaacaatttcgtttaaatggtaaacttgatcgccgtcccaattgcaatcaagtatgtcgtcgtgcgcaatttcaagacctttgcaaaaatctatcacattgtagcattttgcgttcgtgtcgctgtgcacgtatctgtacttgaaactgtgcgtgttgcatttgaatgagtcccatttaacgatgtgcgaccattgttgggcgtttatgtggtactttttgtagtcgtctggattgaaccgatcttcggcggcgatggcgtcgttgtcgttgtcaccggaccacatccaccagttccataaccaggatagcattgctttagcttgtctagcaattcctttgttatacaacgagaaaatttcgttcccttataattatagctgtacggtgcgcgtatttgtttgttaacgttacaaaaaatatccctgtccacgtccggccaatactgcaacgtgagcgcgtccaagtttgaatcttgcatatgcggaacgtacaaacgtacggcctctttcacacaatgcgcaaaactgcccggctgaatgtaatcactgtccaactttgcaggtttctcgaaagccttgtaccgatgcacgcgaacattttgagcggacgtgattttaaacttgtcggtgaattttaaccacaaatgaaatccacggttgccggtatacatgactcttgacacgttctcttccgtgtaaaacaacagaaacgctgtggcgccaatgtaaattttcagcattaaatcgttttcgtcaacataattcttgtaatcggcgtctacgacccattccctgccgccgccgtcgtccaacggtttgacgtgcacgtcggacactttgttttgcacaatataactatacaattgtgctgaggtatcaaaatatctgtcggcgtgaatccagcgcgcgttgaccgtcatgaacgcatacttgcggctgtcgttgtacgcaatcgcgtcccacatcatgtcgacgcgcttctgcgtataattgcacactaacatgttgccctttgaacttgacctcgattgtgttaatttttggctataaaaaggtcaccctttaaaatttgttacataatcaaattaccagtacagttattcggtttgaagcaaaatgactattctctgctggcttgcactgctgtctacgcttactgctgtaaatgcggccaatatattggccgtgtttcctacgccagcttacagccaccatatagtgtacaaagtgtatattgaagcccttgccgaaaaatgtcacaacgttacggtcgtcaagcccaaactgtttgcgtattcaactaaaacttattgcggtaatatcacggaaattaatgccgacatgtctgtcgagcaatacaagaaactcgtggcgaattcggcaatgtttagaaagcgcggagtggtgtccgatacagacacggtaaccgccgctaactacctgggcttgattgaaatgttcaaagaccagtttgacaatatcaacgtgcgcaatctcattgccaacaaccagacgtttgatttagtcgtcgtggaagcgtttgccgattatgcgttggtgtttggccacttgtacgatccggcgcccgtaatccaaatcgcgcctggctacggtttggcggaaaactttgacacggtcggcgccgtggcgcggcaccccgtccaccatcctaacatttggcgcagcaatttcgacgacacggaggcaaacgtgatgacggaaatgcgtttgtataaagaatttaaaattttggccaacatgtccaacgcgttgctcaaacagcagtttggacccaacacaccgacaattgaaaaactacgcaacaaggtgcaattgcttttgctaaacctgcatcccatatttgacaacaaccgacccgtgccgcccagcgtgcagtatcttggcggaggaatccatcttgtaaagagcgcgccgttgaccaaattaagtccggtcatcaacgcgcaaatgaacaagtcaaaaagcggaacgatttacgtaagttttgggtcgagcattgacaccaaatcgtttgcaaacgagtttctttacatgttaatcaatacgttcaaaacgttggataattacaccatattatggaaaattgacgacgaggtagtaaaaaacataacgttgcccgccaacgtgatcacgcaaaattggtttaatcaacgcgccgtgctgcgtcataaaaaaatggcggcgtttattacgcaaggcggactacaatcgagcgacgaggccttggaagccgggatacccatggtgtgtctgcccatgatgggcgaccagttttaccatgcgcacaaattacagcaactcggcgtagcccgcgccttggacactgttaccgtttccagcgatcaactactagtggcgataaacgacgtgttgtttaacgcgcctacctacaaaaaacacatggccgagttatatgcgctcatcaatcatgataaagcaacgtttccgcctctagataaagccatcaaattcacagaacgcgtaattcgatatagacatgacatcagtcgtcaattgtattcattaaaaacaacagctgccaatgtaccgtattcaaattactacatgtataaatctgtgttttctattgtaatgaatcacttaacacacttttaattacgtcaataaatgttattcaccattatttacctggtttttttgagaggggctttgtgcgactgcgcacttccagcctttataaacgctcaccaaccaaagcaggtcattattgtgccaggacgttcaaaggcgaaacatcgaaatggagtctgttcaaacgcgcttatgtgccagtagcaatcaatttgctccgttcaaaaagcgccagcttgccgtgccggtcggttctgtgaacagtttgacacacaccatcacctccaccaccgtcaccagcgtgattccaaaaaattatcaagaaaaacgtcagaaaatatgccacataatatcttcgttgcgtaacacgcacttgaatttcaataagatatagtctgtacataaaaagaaactgcggcatttgcaaaatttgctaagaaaaaagaacgaaattattgccgagttggttagaaaacttgaaagtgcacagaagaagacaacgcacagaaatattagtaaaccagctcattggaaatactttggagtagtcagatgtgacaacacaattcgcacaattattggcaacgaaaagtttgtaaggagacgtttggccgagctgtgcacattgtacaacgccgagtacgtgttttgccaagcacgcgccgatggagacaaagatcgacaggcactagcgagtctgctgacggcggcgtttggttcgcgagtcatagtttatgaaaatagtcgccggttcgagtttataaatccggacgagattgctagtggtaaacgtttaataattaaacatttgcaagatgaatctcaaagtgatattaacgcctattaatttgaaaggtgaggaagagcccaattgcgttgagcgcattaccataatgccatgtattttaatagatactgagatctgtttaaatgtcagatgccgttctccttttgccaaattcaaagtattgattattgtagatggctttgatagcgcttatattcaggctaccttttgtagcattagcgatagtgtaacaattgttaacaaatctaacgaaaagcatgtaacgtttgacgggtttgtaaggccggacgatgaaggtacaacaatgccttatgtcatcggaccattatattctgtcgacgctgctgtcgccgaccgtaaagtgaaggacgtggtaaattcaattcaaaaccaacagacaatgttaaaagtatttattaacgaggctaatgtgtataacaaatggaatatgcttaaaggtttaatttataataataataacaatgaatctgttttagtaaataatgtagtaaaatttataaaggtagataaaaattataatattaataaaaaaaataatgttactaaatgggttcctgcgttaaattattttacgggtagacagctattaactattttatttatttttaaatttaaataaatgtattgttagaaagttgtgttgttttattagtataacgaaaaaatacatgacataaaccgcttccaattttggtcacacaaactcttgtgtggatagtttacgtaatgagttaaataggcgggcagttgtccgctaaacgtgtcggtggtcaagtagatgtgcattaatttacgacaacccaaagcggggccgcttatgtcaagtatttttttcacaaaattggtaatggtttcgttttgttccttgtacaaacacatgtcggtgtgatcgttgacgcacgagttgtacgattccgccggcaggttggcaaacaagcgcttgagatgcttgagtctgcgttcaattttataatcaaacttgttggtgaaaatgtctttcagcaagcacattaactggtcattcaaaacgcgttgcaacgacgacaccaacacatgatattcgtttccaaaaagcgaaaaatttttgatgcagcggtccgcattgaagggtcgtttcatagtgcgcacgttgacaaaaaacacgttgaaagacagcggggctgtggttattttaacgccgttgtcaatatactcgtcgacgccgtctgcgcttgttatgtcaatttgtagcgcaaatctaaccaaatcaaactcatcgttgtactgtgtctttatgcattttatatggcggtttaagtgcaagttgatttgtccgtttaatctataggctccgttttgataacatttcagcactaccaacggatccgacatgtaaacttgacgcgttagcacgtccaattcagcgtaatgttggtcgacgcatttttgtaaattagtttgcaagttgcaaaacatttttgcgcaaaagccgtaatagtcaaaatctatgcattttaatgcgcttctgtcgtcgtcgatatggcatgtcacggctgcgcctccagttaacacgaataaaccgctgttttcgcaaactacggcttcgaaacaatctttgataaatgccaactttgctttagccacaattttatcgcgcaggcgatcttcaatatcctttgtcgtaatataaggtaggacgccaagatttagttgattcaacaaacgttccataatgaatagcggcgacgcaacacgactacactgttcaaatgcgcacgcaaaacaaacccttgcaactttatttgccaatcgtaatcacagtagtttttacgagtatgccatcgcgtttgtaagcacattgctttttaaaaataatttaaatttaatgaccgcgtgcaatttgatcaactcgttgatcaactttgaactccacatgtttggtaaaagtttattgctaaatggatttgttaatttctgcattgctaacagcgacggggttacgattcaacataaaatgttaaccaacgtgttaagttttttgttggaaaaatattattaaaaataaataatgttaagttttttgttggaaaaatattattaaaaataaataaataaacttgttcagttctaattattgttttattttttataaaataatacaattttatttatacattaatactttggtatttattaatacaattatttacaatactttatttacactataatactttatttacattagtactaaattaatactaaattacactaatactaaattaatactttatataatcaaaaataatactttatataatactttctaatcatcataaacgggtaatagttttttctcttgaaatttacgctgcaactcttcgctaaaacacatgggcggtggagtgggagcgggtggagtaggagtccttacgggtttgatgggcgacagttctctggacttgcggaacagcttgggcgaaagcgtcggcgtgcgccgactaatgatttcttcatccggcaacggaggctcgcacattgtgcacgcgtccggtgaggtacacaaaactttcttgggcacgctgtacaccggcttgggcacgctatatgtgttgccaaaatagaactcgttgtggttgccgaacggagacgatgggtgtgaagacggcgatggctgtgaagacaagtccgaaggcgcgataaaagatgaaagtgtttctgaaaccgaagtggtggtagaagtggtagaaggcgggtgcgttacggcaaccacgctgctgctatttctgccttcggagaccacttccagcaatctagagttactctctcgttcttcgcggcgatagtcaatgtcgcaataatgttcataagatgccttttcggcttcggcgcgccttttcatgtatatgttgtgacgcatctcctttaactgcacgtacaaattccagcattgcacagccagtatcgtaagcacgcccattatgattacgggatagttttgattaaacacggtcggctcgtgatcgcttacaatcgctcggcacatgatgcattttttgtaaatgttcacatacacacagttttggctcaaggtttcggtatttgcgtagtcaatttccagatacacgatagagttccagcacattgattccaaatcgtagtgacgatataaaacatctagcgccggtagatgaccatttttgaacacgtagatttgaaacgcggcaaacagcatccaacacagcccagtgatcacgtttaccataatacacgtgatagcgacgtaaaagttttctttcgcattgaaatttacatttgtgtttgaagagctgctgcgatttttcgtccacacgataatcttccatataaaataaaacatgtaaaataatatccacatgccgaacgccagcattatcggtatagatagattgataaccgattgctttccttcaatttccagcaaaaacgcgtatctgctgtctatcactcccattatagataacacaaacactatcaaatatgctaataataatgaggcattaagcccgaattgtaaaactgcagtgattttatttaacattttaaatatttaattcaacaactaagtaatggcaatatgtatcgagtactgatcgtgtttttcctgttcgtgtttctttatatagtgtaccagcccttttatcaggcatacttgcatatcggacatgcccaacaagattacaatgacacgttggacgataggatggattacattgaatccgtaatgcgtagaaggcactacgtgccgattgaagcgttgcccgcaatcaggtttgatactaatctcggcacgttggccggtgacacgattaaatgcatgtcggtgcctttgtttgttagtgacattgacctgccgatgtttgattgtagtcagatatgcgataacccgtctgcggcgtatttctttgtcaacgaaacggatgtgtttgtggtcaacggccacagactgacggtgggcggatactgctccactaatagtttgccccgcaactgtaatcgcgagacgagcgtcattttaatgagtctcaatcagtggacgtgcatagccgaggacccgcgttactatgcgggcacagataacatgacgcaactcgcaggcagacaacactttgaccgcattatgcccggacagagtgataggaacgtcctgtttgaccgattactaggccgagaggtgaacgtgaccactaacacgtttcgccgcagctgggacgagttgctggaggacggcactaggcgttttgaaatgcgctgcaacgcccgagataacaacaataatctcatgtttgttaatccgcttaatcccctcgagtgtctcccgaacgtgtgcactaacgttagcaatgtgcacaccagtgttagacccgtatttgaaacgggagagtgtgactgcggcgacgaagcggtcacgcgtgttacgcacattgtgccgggggacaggacctctatgtgtgccagcattatagatggcctggataaaagtacggcatcatatagatatcgcgtagagtgcgttaatctgtacacctctattctaaattattctaataacaaattgttatgtcccagtgacacttttgatagtaacacggacgcagcttttgcctttgaagtgcccggctcctaccctttatcgcgcaacggcatcaacgagccaacttatcgcttttatcttgataccagatctcgagttaattacaatgacgtcagagggcagttatcttaattgtgataacacaaacaataagtcatttaaatgttacgtcagtagttagtatataagccgtacatgttggcttgcaaattcagtcaatatcaggcttttatcatggacggtgtaaagctgctagggacgtgcgcgctaataattttgttatcgacgacgagtacagttgtcgggcgtgaccgtatcacgtttacgccgatagaagatagcgcaggcctcatgtttgaacgcatgtacggcttgcgacatcatacagacgacagatttgtgtttgtgaaaaaattcaattttgtttcggtgctgcaagagctcaataatatcaaatctaaaattgaattatatgaagcgcaagtttcaacttgcacaaacgtcagacaaataaaacagaacagatcgagtatcatcaaagctcgcattgaaaatcagctgcagtttttgacgcaactaaacaaaaatctcatcacatactctgtggaaagcagcattttaagcaacgacgtgctggacaacatcgatctggaatatgacgacagcggtgagtttgacgtttacgacgaatacgaacagccttcgcattggagcaacatgactgtatccgacgcgcaagctttgctccgaaacccgcccaaagacagagtaatgtttttggacacggttaccaccagcgacgtgagcagcaaatacgaagaatacataaactgcattgtgagcaaccgtaccgttgaaaacgagtgcatgtttttagccaacatgatgaacgtgctcaacgacaaattggacgacgcagcagctttggccaagatgctggagcgaatagtaaaacaaacgcgaaagaacaaactcaacatctccaacacggttatagacgacgacacgctgctaacggaaatgaaaaaattagtgcaaactttatacaaccaaaaccgcgtgtgggtagtggattttaacaaggacatgaatagttatttcgatttgtcgcaagcgtataaattgcatttatatgttgatttaaacacggtcattatgtttattaccatgccattgttaaaatccaccgccgtttcgtttaatttgtatcgcgtcatgacggtgcctttttgcaggggcaaaatgtgtctgcttatcatttcgggcaatgaatactttgggattacagacagcaaaaactattatgtgcccgtatctgataactttaaacaagattgccaagagtttacgggctacaatgagtttttgtgtcccgaaactgagccgattgccactatgaactcgaaagtgtgcgagattgaaatgtttatgggtcgatatagcgacgacgtggacaacatgtgcgacattagggtggccaattataatcccaaaaaagcttacgtgaacactttaatagactaccgaaaatggttgtacatttttccaaacacgaccgtgtccgtccactattattgtcacgacgcgcttgtagaagttgatacaaaagtttcgcccggcgttggtgttatgttttcgactatggcgcaaacgtgttcgattagaataacgtatgatgtgaccataactgtagattcgcgattttatgtcagccattcaactacatactggcctaaaaagaaatttaattttaacaactacatcgaccaaatgttgctcgaaaaagcgaccactagttttataccgactgttgacaattttacccggcccgttttattgcaacttcctcataaatttcacattaaagattacacctcgacgccccatcattttttccatcagtctaaaatttacaccaacagcgcggcgcccgacgaagactcgcaagacgacagtaataccaccgtggtaattatcgctattgtcgctgcaatgctcctattctgtggattattgttatttttgttttgctgtataaaaaaacggtgtcatcaatcaaataacgtggttgtgcaatacaaaaataacaatgaatttgtcacaatttgcaataatttagaagacaatcgagcatacattaatttacctaatgaatacgatagcgatgatatgccaaaaccattgtaccctttacttggctttaatgatgatttgttaaaagatgataaacctgtgttgtaccctatgattattgaaagaataaaataaaacatgtataattgaaataaatatattatttaataaaatattttttatttatatactattttctattaaatattccaatgcacacaaatttttaatggctatcagttttaattttactaattcgtctaaacaaaaattattcacttgctgtttttcatccatttgacatatggcgtttataaataattcgctgtgttttatgaacgaatcgtaaaccgctggctgggccttcagcacggtcggcgcattgtatttttgggtaaagtacgcaatatttttagtcaaacacagagattttaaatctttttcatttatatccaagtcggaacaatcgtatacaaaatctagcttttcactttcgggcgcgcccagatactggtttacgagttcgagctgctccacttggcctttgatatctgccgctatgcataacattttgtcgattgcagtttcattgtttttaacataataatttttaacttttttattttgcaatttaatcaaactatttaaattcgcttgacctttcttacaaagcgcagttaatatgcaagacattttgacttataataaaaaacaaaacttttatatattcatttattgttcaataataacaaatattccaggcttaaaagctaacgaatagggcttttcggtaattttcttattattcatgtccgtcatctgcatctctttgccgtacttgacgccgtcaatggtgcccatcatgtacattttaatctcctccgaaggtccgtctattttgtccatttcgaacaatctatcaaaatcttcaacgctcattctctgcatatcaagaggaacgtttctgatctttccggtggcgtaaattgatccgttgttgtcacggttgattatgtaaaaccgacgaatcaacatgtcgcgctcgctagttttgttcttatccggcaaatgaatgcacacgtttggttccatcttcaaaggaaaatcgctttgcaagtgtttttgcaaaatgttgccaaatatattgttgtgtttgtgaatgtctccgtattgaatgctaaaaaactggccaaagttgcttttggcacgttttatggttccaaagtcggaaaaccaaaatccgcagggcttgccctgcactcttggaccgatggtgtacgtagtcttgccgttggccggctccaacaccacgatatttttatcgggctcgggatacaacttgtcttcccattcgtgcaaactgttcaaattagacagtcgacaaaattcgtttttcaaaaatctgccttcgaaacaactacaattcagtattgaaaagttgcctcgtttcacattaatcgccatctgctcctgccacagcatcttcgtcaactcgtgtggctccaattgaatggacgacggcgtaaaatagcacattacgcccgtttcgtcgtgtttcacgttaaaagcgccgctgttgtacggcaccagctgctggtcctcaccaccttccgatctttcccgcttcggctggttgtcgtcgctgctcgaatatccatcgccaatcttgcgtttagttgccatgctaccgacgtgcgctgtctgctgtggttcaagtctaattgaagtgtttcacagaatataagatatataataaatatggacgactctgttgccagcatgtgcgtagacaacgcgtttgcgtacactactgacgatttattgaaaaatattccttttagtcattccaaatgcgcccctttcaagctacaaaattacaccgttttgaagcggttgagcaacgggtttatcgacaagtatgtggacgtgtgctctatcaacgagttgcaaaagtttaattttaagatagatcggctaaccaactacatatcaaacattttcgagtacgagtttgtagttttagaacacgatttgtccacagtgcacgtcattaacgccgagacaaaaaccaaactgggccatataaacgtgtcgctaaaccaaaacgacgcaaacgtgctcattttgaccgtaactttaacgagctaaaatgaacgagggcacgcccccgttttattttatcagcgtgtgtgacaactttcgcgacaacaccgccgaacacgtattcgacatgttaatagaaagacatagttcgtttgaaaattatcccattgaaaacacggcgtttatcaacagcttgatcgttaacgggtttaaatacaatcaagttgacgatcacgttgtgtgcgagtattgcgaagcagaaataaaaaattggtccgaaaacgagtgtattgaatatgcacacgtaaccttgtcgccgtattgcgcgtatgctaacaagatcgccgagcgtgaatcgtttggcgacaacattaccatcaacgctgtactagtgaaagaaggcaaacccaagtgtgtgtacagatgcatgtccaatttacagtcgcgtatggatacgtttgttaacttttggcctgccgcattgcgtgacatgattacaaacattgcggaagcgggacttttttacacgggtcgcggagacgaaactgtgtgtttcttttgcgactgttgcgtacgtgattggcatactaatgaagacgcctggcagcgacacgccaccgaaaacccgcaatgttattttgtattgtcggtgaaaggtaaagaattttgtcaaaactcaattactgtcactcatgttgataaacgtgacgacgacaatttaaacgaaaacgtcgacgacattgaggaaaaatatgaatgcaaagtctgtctcgaacgccaacgcgacgccgtgcttatgccgtgtcggcatttttgcgtttgcgttcagtgttattttggattagatcaaaagtgtccgacgtgtcgtcaggacgtcaccgattttataaaaatatttgtggtgtaataaaatggtgttcaacgtgtactacaacggctattatgtggaaaaaaaattctccaaggagtttttaattcatattgcgcctgatttgaaaaacaacgtcgactggaacggcagcacgcgcaaacagctgcgcgttctagacaagcgcgcctacaggcaggtgttgcactgcaacggcagatactactggcccgatggcacaaagtttgtctctcatccgtacaacaaatctattcgcacgcacagcgcaacagtcaaacggaccgacagctcgcatcgattaaaaagccaggtggtcgacaaacgaccgcgccgctctttagattctcctcgcttggacggatatattttggcatcgtcgcccataccacacagcgactggaatgaagaactaaagctgtacgcccagagccacggctacgacgactacgacgacaatttagaagatggcgaaatcgacgaacgtgactctttaaaaagtttaaataatcatctagacgacttgaatgtattagaaaaacaataaaacatgtattaaaaataataataataaaactatattttgtaatatataatgtattttatttaaaaattgtctattccgtagttgagaaagttttgtcttgacttcataactttcttctccatattctgcagctcgtttacgttttttgtgacgcttttaattttctcaaaatgctggctgtcaatagttattttttgcttttgtctattaatttcttccaattgagattttaaatctcgctgagattgagatgcgttgtaattccttgagaacatcttgagaaaacatacagatgaggtaaaacagcatcttttatccaaattaggagttaattattattcatttgtatcgcgaccatttgctcgtacacatcttccataaaatggttatttttattgcgataagtgttggcattgacattttgcaaatgtcgtaggttaaaggggcaaatgggctgcgtggccgataaaagattccagttcaacaatccctcttcgcccccgtttaacttgaaaatggcgctacacgtttctacgctatcgtgttcctgttgagtggcgcagggttcgaccagtatcatcttgtgatatgcggttttgacattcatgtgcaacggaataacttgcgggtcatcgcattcgtcggaattaagctttaaatggcgtccgtatgctttccaaagtttttcgtcgtcgaaccgcggcactgcttgcaagtcgacgcggggaaacggcgctctgtacaaaacgcctaaattcaaaaactgattgcattgttgcagctctgtccaatcgacgcgatttttgtaattttgaaacagcatcaggttgaacgccgcgctggcgcgcacgtttgtaatcactgtgtaattgatcagcttgtgccaatactggacattgaaattttcttcaaactcatttctaaactctggatgcgcaaacatgtgtctaatgtagtacgcgggcggggcgttgaacgcagtccatttgtcaatacacttccagtccgaatgtaacgtgttcaccaaaccgggatattcgtcaaacacgagcatgtgatccgaccacggtatgctgtgggcgatcaattttagttcttgcacgcggccttcgcgtaagcaatacaaaatgagcgcgtcgctgatcttgacacagtcttgcatgtacgcggacaaattaacgttttccatacagctcacattgtttattagcgccgcgttcaagtgtttgtatttggacacataatcgtagttgatgtactgtttaatgggttcttgaaaccattcttttagtagtatgtgactggccactatgcgtttccaatttaatttgtgtgcgtatttttgctgaaccgacaacgagaggttattgtaatttttggatatttcttccatgtccaacaagtcgccaaacgcgagtataaaatcttgcgtcaaaaatttttgctcagacaccaacgaccagatcaaatgtgatttaaacctgttggcgattgttatcgacaacggcgaaattgaaataattttccaatccaacttgttgcgaaacacgtgaataaaatcgacgcgtccgtaacattcgcgcgatatgcgcttccaaaacgtgtcatcttgcaaattaagcaaatagagacgattgttgggagatttaacggccaattcaataatttttatatattctttttgctttaaagcgcgttgtagcacttgggttggagccatgtcgactgaagcttactacaatatgttatacacataaataaaaaaatcaaatgaaataaagtattttattacaagttaaaattgttattcaatcgtgcaatctgacgctccgtcatgctcaagtgcacggcatcgatgagctgttctcgagtcaagttttgcaacagcgtgatcttgttgtgcttagctttgtactggtttcgaggcagcgtttctttgactttgttaagcacgttcatggcgttgggcacgtagtcgctgctgaataccacgtcggacgaacccaaacgtttaatgctacggttgagactgcgcttttgcgcgcgcagaaacgcgtactcttctccgcctaacgcacacacggccaacgaatgtagcagttggggattgtcaggtttggctatcacgtcttgcgcaatgtccgccatgcggttggccagctgcgccgtttcgcggcgcgcgttttcgcaatctttacgcgcctcgtttaacattgcgttagcttgcaccaatccggtgttggcggtcaccaacgcattggcaaaatgtataattttttcgttggccttggctagactttcgctagcaaacgtcaactttttatttaactcttcaattgcaccataatttgcgtccatctcgacggccggcgcgtacttgcccgtgcacagcacctgcggaatcacctcctcgagcagccacgcctgcaactccaccgcgtacggaagcttgctcttcattatcagctgaataacgccctccttggtgatgagcactgtgtgcgggtgcaagtacagcgggtcgccctgtttggccaaggcgttcgaaacaaggggggcgatttgtcccccatgctcaaacgtgcttctgtacttgtcgtcgacgtgtattttaattgcgcgtttggcgtcttgatatttcaagctggcggcaacgtccttggccacaaacttaagcggctggtcgcgctccaacacgtaccgcagcgagaacgtgtcctctccaaatttaaactcgccaattttaactcgagacattttaattaaattaaatttattaaacactttgtaactcgttgaaggttcgacgcaaactaaacgcggcgaccgtgttaataaacttggttaaatttcatggcaattcgatacatgtttgctttttatcaaaatggcgtaattaattaagaaacaacatgaaagccatctgcattattagcggcgatgttcatggaaaaatttattttcaacaagaatcagcgaatcaaccgcttaaaattagcggctatttgttaaatttgcctcgaggtttgcacggctttcacgtgcacgaatatggcgacacgagcaacggttgcacgtcggccggtgagcactttaatcccaccaatgaggaccacggcgctcccgatgctgaaattaggcatgttggcgacttgggcaacataaaatcggctggctacaactcactgaccgaagtaaacatgatggacaacgttatgtctctatatggcccgcataatattatcggaagaagtttggtcgtgcacacggacaaagacgatttgggccttaccgatcatccgttgagcaaaacaaccggcaattctggcggccgtttgggatgcggaataattgccatatgtaaatgatgtcatcgttctaactcgctttacgagtagaattctacgtgtaaaacataatcaagagatgatgtcatttgtttttcaaaactgaactcaagaaatgatgtcatttgtttttcaaaaccgaactcgctttacgagtagaattctacttgtaacgcatgatcaaaaaatgatgtcatttgttttttaaaattgaactggctttacgagtagaattctacttgtaaaacataatcaagagatgtcatattttgcacacggctctaattaaactcgctttacgagtagaattctacttgtaacgcatgatcaagggatgatgtcattggatgagtcatttgtttttcaaaccaaactcgctttacgagtagaattctacttgtaaaacacaatcaaggaatgatgtcatttgtttttcaaaaccgaactcgctttacgagtagaattctacttgtaaaacacaatcgagggatgatgtcatttgtagaatgatgtcatttgtttttcaaaaccgaattcgctttacgagtagaattctacttgtaacgcatgatcaagagatgatgtcattttttacacatgattataaacgtgtttatgtatgactcatttgtttttcaaaactaaactcgctttacgagtagaatcctacttgtaacgcacgattaagggataatgtcatttatttgtgcaaagctgatgtcatcttttgcacacgattataaacacaatcaaataatgactcatttgttttcaaaactgaactcgctttacgagtagaattctacttgtaaaacacaatcgagggatgatgtcattttaaaatgatgtcatttgtttttcaaaactaaactcgctttacgagtagaattctacgtgtaaaacacaatcaagggatgatgtcatttactaaaataaaataattatttaaataaaaatgtttttattgtaaaatacacattgattacacgtgacatttacgatggcgaacaataatttcactttttatattatgacacgacgtgtatataggaaagcttaagcgtttcaataaagccatggcgtacacgctaagcttgcccagcttgcggctctttgaaatctgtagttttcggggagtaccgtcgttcttcagtgccacatacgtcaacttgcgatcgtacactttataatacgtgttgtagttatttttttccagaaattccctcataaagcaatccttggataaagtttttgatccgtacagttggccacaccggtccatgcacaggtacacacacgtgatggcgttttgaatgacgatgcgatttctgtcaacagcaacgcgcttgaatatggtgtcgacgttgtccgattcaatggttccgtaaacagctccgtctggatttactgccaaaaactgccggttaataaacagctggccgggaatagacgtgcccgtgatgtgtgtcagcagagctgagcagtcagccatagaggctagagctacaagtgccagcaagcgatacatgatgaactttaattccccacagcaaactggcgcttttatataaaaatttgggccatttttggcgattagataatttttgaagattagataatattgagattagttaataatttgtgtgattagataactttttagggtattgcgcattataaatcgaggtcaagttgtataaactgctctggcgtgtaaaactgcagacttaagttttttgcaaacactcggtctgaatcgctaaaatctttatgaccggtggttagattaattcggccagccgcgtcgcccacataaaaagattgttccttgtcaatatgcgtaaactgtttggccatctcgcgccacattcccgtgttgggcgacacataaaacgatatgggcacgccaataacttttttaatattctctaatttatataataaatcgctcgctttgattttgccggaacctaaatgggcttggttcgtaaacacaactaaatcgtagcccaattcgtacaaacgctttagcttgtgtgcgcacggaaggagctgccagtcgtctgggttttttggaaatttggactgtgtctttgggctaattagcgtgccgtccaaatcaaaagccgcaattttggttcttttggcgccgtcatgaaccgcgtacgcatacaaatcgggctgctgtaacgtccacatggtgaatgtatcttactcaaagtccatcaattcatacgcgtttgtgtccaggtcgggcgttgaaaagttgtagcttgccatcagatcggatagcgactcgaattttgtgagcgtttgcagcgcacgtttggcatcttgtttaaaattacacgacgacagacagtaaaagtattcttcgataagcatgactacacccatatcactgtttaggtgctcgacatagttgttgcatgctatgtcgcgtgtgccccgatacgcgtggtttcggtgaaaatcacaccacagccagtcggcgtgcgtgtaacaaagtcgacagcgaaacaatttatcgttttccaaaaaattcaaatactcgacagttttgcagctgagattgcgcgtttgattcaccttaaaatcgtcgtcagcctctataatttcgggcaacagcttgccttgttgccccatcgtatcgatcacctcgcccaagtggcccggtgttatattaagtcgtttgaaagcatctatcgcttcttgcacgtcggcctgataatttttgaccacgggcgtggaaatcaattgccgttgaagggaaataattcgtggtgtgggtatcggccgcctgttgcacaattccaccagcggtggaggcaagggcgcattcacagcaaccgttgtcatttataagtaatagtgtaaaaatgcaaatattcatcaaaacattgacgggcaaaaccattaccgccgaaacggaacccgcagagacggtggccgatcttaagcaaaaaattgccgataaagaaggtgtgcccgtagatcaacaaagacttatctttgcgggcaaacaactggaagattccaaaactatggccgattacaatattcagaaggaatctactcttcacatggtgttacgattacgaggagggtattaataataacaataataaaaaccattaaatatacataaaagttttttatttaatctgacatatttgtatcttgtgtattatcgctaaccattaaaagtgctggagccacagtgttgcggcgagtctttatagaagatcgttgtttggctggaactgagcttttccttttcctgctgccgctaatgggagtgggcacgtactctgtagtagacggtgcaacgggcaacttgagcgctaccgtcttaaatttggccatacttttagtgatgaaatcgcgcgttaacacttcgtcgtaaatgttacttagcagaggcgcaacattgtgattgaatgtctcgtttaacaagctgtaaaactccgaataaagcttatcgcgcatttcgcagctctccttcaattctgccaaatttgcgttggtaagcaccacagtctgtctttttttgctagctggaattgctgcgttctcgctagaagacgacgatgtcgagcggtcggccatttttttgcccagcttttcagtgtgatcaaaaatgaacacaaaatctgccaattcgggcttgtttttcaccaaatcccacatggccgggctactaggccactcgggctgcttgatcttagtgtaccaactgttaaacaaaatgtatttattgttgttaatcactttcttcttgcgtttggacattttgcgttcgtcttgcatgacaggcaccacgttaaggatatagttaatgttctttctttccaagaaatttacaataacggccagctggtccatgttggatttgttgtaagagctcgattccagtttattcaacagcttttcatttttgcacacggccgcagtctccggagattgttgctccggcacgtttaccatgtttgcttcttgtaaacctttgaaacaacccgtttgtattcttgatgatatatttttttaatgcccaacaacctggcaattcgtttgtgatgaagacacaccttacgcttcgaacatttgtcggtgattactgtgaaatggcctaaattagctcttatatattcttttatacgctcaaacgacacgatgtccaacatgtgcgcgcagacgttttctgtgttcatcgtgtgcttgagcgtgttgatggcttccctgaacagcgcttgtatttcgctgcgagtcaagcagtccgaatcacacccgcctaagtgcgtgcaatttttggggggcatcgttgtctatctttttcagagttgcgtagaaaaagtcctgcaattgcctattatcaaaacgcgccttgacgctgcgcacaaaatcaaaaaattcaatgtaattgctgtaatcgtacgtgatcagttgtttgtcgttcatataattaaagtatttgttgagcggcacgatggccaggctgcgcgctatttcgcaattgaagcgtcgcggttttaacattatacggtagtcgttgccaaacgtgcccggcaacaacttcacggtgtacgtgttgggtttggcgttcacgttaatcaagttgccgcgtacgacgcctacgtatatcaaatacttgtaggtgacgccgtcatctttccattgtaacgtaaatggcaacttgtagatgaacgcgctgtcaaaaaaccggccagtttcttccacaaactcgcgcacggctgtctcgtaaacttttgcgtcgcaacaatcgcgatgacctcgtggtatggaaattttttctaaaaaagtgtcgtttatgtcggcggcgggcgcgttcgcgctccggtacgcgcgacgggcacacagcaggacagccttgtccggctcgattatcataaacaatcctgcagcgtttcgcattttacatatttgacacttaaaaaattgcgcacacgagcaccatcgtttgatacctaattgcaactatttacaatttatcagatttacgttgaacccgttttaattttttagatccgtccttgttcagttgcaagttgactaaatgacaaaatttttcggttctgcaaaaccgcccttgtctgttccacccgttgtatttgaaaaaactttttttcacgcggcgacaactgcttgtataatattgcccaatgtaaacatgcaaaattttgttactctcgtcaaaacagcggttggcgttccattccataatttttttattatttatcaacgatggccattgtaaattgtcgtcatttatacgcatcatatgatttaacaaaagcttttcgtatagcggaacttcaattcctttggaacatttttcaaacgataatttaatttgtttctcggttggcagcatttcatgcttgatcaacaatcgcctgacttttatagccacgtttatgtctttgcacagcaaatgtgggttgtcgacaatgtaatagtgcaaagcatttgttacggcaaatgcgtagtttgatttgacgacgcccttgttcttgacgggcattgcggcttttaaaattacttgcaagcattgtacgaatacctctttgtgtttaaacaataatatggacaaacatcggcgaaacaatttgtaataattatgaaatcccaaattgcaggttttaaacttctttgttacttgttttataataaataaaatttgccgacccatgtctgcgcccacaactttaattaaccatttgtgcgcatattgattgtctcgttgttcccaattggaaaattgattgatctcgagccaccgacattggtcgtttgataccgtcgttaacgccgacgctcctgcctgtttgattacgggttctaaaagacgaaacagcagcgtaaatttgtttttgcgtcggtagtattttggcaggcaataatcaaaaaaatccgtaagcaattctctgcatctattaatattcgttgcgtacgaatcgagtttttcaaaaattactttgtttgtatgaaaataacgtttgggcttctcacaataataatcttcgttgtagaacagaaacggtttgcgagaattggcacgtttgtccatgattggctcagtataacgattgattcaaatcaaaattgacaacacgtttgccgtaatgtgcaccggttcgcacacgtttgccgcgtatgtaatccatgtttatttcgctgtcgcaattgatcacacgattgtgttgggcggcgcgttttattgaatttaggcgacgcgtcgacaactccaaaggattgtaaagcgcagatttttccagagtaaacgagtttaagtggccaccgttgaaccattccagagccacgattgtgtacagcaaaaagaatatttctttgtcgacgttttcaaacgcaaacttgttttttaggcaatagtagtaaaattttaacgaattgtataaataaaacatgaaattgccatttttaaagtaaaattctacatccgtgacgaacaaaaggtttactattttgttctccaacaagtgtgccaattttcttaagtacaccattgaatttttgtcgtcgtccatctcgatcaacaacacgtacggcgttttggaatttaaaattattctaaaattttcctgttgcaacgattccacagcgtccgaccaatatgacgctgccacctctagacagatgtatttcttggaaaacacgtgtcgtttgataacctcgctgatggacgtgatcgattgtaaatacttttcaaacgtcgcgtcttcccaaccacgcaccgacacgggcgctgtcgtgtcgggctgatgtttgaaatccaaaccactctgaattaacttggttgtgattcgtatgctcaactgttgacccaacgtgtagtgatcttcgtaggcgcgctcccacatcacgttacacacaaatttgacgagatcatcaacgtctttctgttgcaaaattcgccgcaaacgcgccacatcgcccttgtaccaccgatctcggcacacaagctgtagcattttcaaatcgtgatcgctcaagctatcaattctggttagatttatatagtcgtcgatatcctcgggcgtggcttgcgtcatgtctgtaaaacgtgcaaaatcaaatatttttatgttgtagtcaaatctaacaaatccatcggcgttcacttgcacttcgcgctttacaaaacgaggtagcgtgtaatcgaacccgtttaaatagattgcgtacaaaaccagcacttcatcttccagtttgcacgcttgcggcaaaaattgtgtggtgtgctccaaccgggtgacaaacatgactatggaaaatgacgcggaattcaacagacgactagagtacgtgggcacgatcgccacaatgatgaaacgaacattgaacgttttacgacagcagggctattgcacgcaacaggatgcggattctttgtgcgtatcagacgacacggcggcctggttatgcggccgtttgccgacgtgcaattttgtatcgttccgcgtgcacatcgaccagtttgagcatccaaatccggcgttggaatattttaaatttgaagaaagtctggcgcaacgccaacacgtgggcccgcgttacacgtacatgaattacacgcttttcaaaaacgtcgtggccctcaaattggtcgtgtacacgcgcacgctacaagctaacatgtacgcggacgggttgccgtattttgtgcaaaatttttcagaaacaagctacaaacatgttcgtgtgtatgttagaaaacttggtgcgatacaagtagcgacattaccagtttacgaacaaattattgaagatacaataaatgaactcgtcgtcaatcacgttgattagataatgtgcgtgttaaatgtgatattttagattacgagcgcgcaataaccatagtttaatcgaagagaatagccgtcgccacaatggataattacaaattgcaattgcaagaattttttgaccaagcgcccgacaacgacgatcccaactttgaacatcaaacgcccaatctattggcgcatcagaaaaaaggcatacagtggatgattaacagagaaaaaaacggccggcccaacggcggtgtgcttgccgacgacatgggactcggcaaaacgctctctgtgctaatgttaatcgcaaaaaataactctctacaattgaaaactctaatagtgtgtcctctgtctttaatcaatcattgggtaaccgaaaacaagaagcataatttaaattttaacattttaaagtattacaaatctttggatgccgacacgtttgagcattaccacattgtggtgaccacgtacgacgttttattggcacatttcaaattgatcaaacaaaataaacagtcaagtctgttttcaacccgctggcatcgagttgttctagatgaagcgcatattatcaaaaactgcaagacgggcgtgcacaacgccgcgtgcgctttgaccgcaacaaaccgatggtgcattactggcacaccgatccacaacaagcattgggacatgtactcgatgattaattttttgcaatgtcgtccttttaacaatccaagagtgtggaaaatgttaaataaaaacaacgactctacaaatcgcataaaaagtattattaaaaaaattgttttaaaacgcgacaaatctgaaatttcttctaacattcctaaacacacggttgagtatgtacatgttaattttaatgaagaagaaaaaacattgtacgataaattaaagtgtaaatcggaagaggcgtatgtgaaggctgtggcagcgcgtgaaagcgaaaacgcactaaaccgattgcagcaaatgcagcacgtgttatggctaatactgaaattgaggcaaatctgctgccacccgtatttggccatgcactgtaaaaatattttggaaacaaacgactgttttaaaatggattatatgagcagcaagtgcaaacgagtgctcgacttggtagacgacattttgaacacaagcgacgacaagataatattggtttcgcaatgggtggaatatttgaaaatatttgaaaacttttttaaacagaaaaacattgctacgttaatgtacacgggccaattaaaagtggaagacaggattttggccgagacgacattcaacgatgctgccaatactcaacatcgaattttgctgctttccattaagtgcggcggcgtcgggttaaacttaataggcggaaaccacattgtaatgttggagcctcattggaacccgcaaattgaattgcaggcgcaagaccgaatcagtcgtatgggacaaacaaaaaacacgtacgtgtacaagatgctaaatgtggaagacaacagcatcgaaaaatacattaaacaacgccaagacaaaaagattgcgtttgtcaacacggtctttgaagagactctgctcaattacgaagacattaaaaaatttttcaacttgtagctggtaagtcgtcatgaacacccgatatgctacttgctatgtttgcgacgagttggtgtacttgtttaagaaaacgtttagtaacatgtccccttcggccgctgcgttttaccaacggcgcatggccattgttaaaaacggtatcgtgctgtgcccacgttgttcgtcggaactaaaaattggcaacggcgtttcgattccaatttacccccaccgcgctcaacaacatgcacgacggtcgcgttaagacgcaagcgcttcgagttttggcccgctcgctacctccgctgtacgattcgaccgtcgatcgacacggctgcaaggtgttcacggtgcggcgctacaacagacgcgtaatcgactttgcgggcattcgcaacaaaacgctggaaatcattaaaacggatagaaacttgccgctcaacacagaatgcaatgtgaaagttgtcgacagtgcatgcatgcgttgcagaaaaagtttcgcagtttaccccgccgttacctatctgcattgcggacattcgtgtctgtgcaccgactgcgacgaaacggtaaacgtggacaacacgtgtcctaaatgtaaaagcggcattagatataaattaaaatacaaaactttgtaacatgttgccctacgaaatggtgattgccgtgttggtttacttgtcgccggcgcagattctaaatttaaaccttccttttgcataccaaaaaagtgtgctgtttgccagcaactctgcaaaagtcaacgaacgcatcaggcggcgagcgcgtgacgacaacgacgacgacccctatttttactacaaacagttcataaagattaattttttaactaaaaaaataataaatgtttataataaaactgaaaagtgtattagagcgacgtttgatggtcggtatgtggtcacacgcgacgttttaatgtgctttgtaaacaagagttatatgaagcagttgctgcgcgaggttgacactcgcattacactacagcaacttgttaaaatgtatagtccagaatttggtttttatgtaaatagcaaaattatgtttgtgttaactgaatcggtgttggcgtctatttgtttaaaacactcgttcggcaaatgcgagtggttggacaaaaatataaaaactgtgtgtttacaattaagaaaaatttgtatcaataataagcaacattcgacatgtctatcgtattgattattgtcatagttgtaatatttttaatatgttttttgtacctatcaaatagcaataataaaaatgatgccaataaaaacaatgcttttattgatctcaatcccttgccgctcaatgctacaaccgctactactaccactgccgttgctaccaccactaccaacaacaacaacagcatagtggcctttcggcaaaacaacattcaagaactacaaaactttgaacgatggttcaaaaataatctctcatattcgtttagccaaaaagctgaaaaggtggtaaatcccaatagaaattggaacgacaacacggtatttgacaatttgagtccgtggacaagcgttccggactttggtaccgtgtgccacacgctcatagggtattgcgtacgctacaacaacaccagcgacgcgttataccagaaccctgaattggcttacaatctcattaacgggctgcgcatcatttgcagcaaactgcccgatccgccgccgcaccaacaagcgccctggggcccggtcgccgattggtaccatttcacaatcacaatgcccgaggtgtttatgaacattaccattgtgctaaacgaaacgcagcattacgacgaagctgcgtccctcacgcgttactggctcggcttgtatctgcccacggccgtcaactcgatgggctggcaccggacggcaggcaactcaatgcgcatgggtgtgccctacacgtacagtcaaatgttgcgcggatatttattggcgcaaattaggcaagagcagggaatacaagaaatcctaaacacgatcgcgtttccgtacgtgactcaaggcaacggcttgcacgtcgattcgatatacatcgatcacattgacgtgcgcgcttacggctatttgataaattcatactttacgtttgcctattacacgtactattttggagacgaggtaatcaacacggtgggtttgacgaaagccatcgaaaacgtgggcagtcccgagggagttgtggtgccaggcgtcatgtctcgaaacggcacgttgtactccaacgtgataggcaactttattacgtatccgttggccgtccattcggccgattactccaaagtgttgaccaaactctcaaaaacatattacggttcggttgtgggcgtaacgaataggttggcttactacgaatccgatcccacaaacaacattcaagcgcccctgtggaccatggcgcggcgcatttggaatcggcgcggcagaattatcaactataatgccaacacggtgtcgtttgagtcgggtattattttgcaaagtttgaacggaatcatgcgcatcccgtcgggcaccacgtccacgcagtcgtttagaccggccattggccaaacggctatagccaaaaccgacacggccggcgccattttggtgtacgccaagtttgcggaaatgaacaatttgcaatttaaatcgtgcacgttgttctacgatcacggcatgttccagctatattacaacattggcgtggaaccaaactcgctcaacaacacaaacgggcgagtgattgtgctaagcagagacacgtcggtcaacaccaacgatttgtcatttgaagcgcaaagaattaacaacaacaactcgtcggaaggcaccacgttcaacggtgtggtctgtcatcgcgttcctatcacaaacatcaacgtgccttctctgaccgttcgaagtcccaattctagcgttgaactagtcgagcagataattagttttcaaacaatgtacacggccacggcttcggcctgttacaaattaaacgtcgaaggtcattcggattccctgagagcttttagagttaattccgacgaaaacatttatgtaaacgtgggcaacggcgttaaagccctgtttaattatccctgggtaatggtcaaagaaaataacaaagtgtctttcatgtcggctaacgaagacactactataccatttagcgttataatgaattccttcacctctatcggcgaaccagctttgcaatactctccatcaaattgctttgtgtatggaaacggtttcaaattgaacaacagcacgtttgatttacaatttatttttgaaattgtgtaattatatttagggagaatgtgatattcaaaagactgactgttaacacaaaagactgatattgttgttgttacaaaatagataataaaacaaaaaataaattaaatattatttatttattaaactatttaattttaatgctaacgcgtacaaatcacgctgttccgccgtggacatggaattgcgcagaaaagtcttgatagtgtcgatttcttcgccgtcatccacttccatatatttgatttcttcctcgatttgcatttccaagtttgcgtattcttgcaaataataatctagtcgttgggcgacctcgccaattttaaataatacattatccgacaccaaatgccagcgagtgactgtgcgctccatcatcctggcactttttaatgtgaatattaaaaggttgttgcatatatatcgttaaacgtttatgtttactttcacgttagctcgtttcattgatgtaaacatttagttttataacagcgtcggtaattttattttttaaagtaaacagaccaaaatcaaaggtgtcttcgacaggtacgattattttcccattgacgctgttttcgtgcacagatataattttatcactgtttattattttgcccaaacacacgtactcgttttttctcaagccaactatttctaaacaattcacttttctattatcgtgtgcgcaattaaaagtaaacgaagcgctacaattgtcgtattctattacaattctgcggcatttataaaatttattaatgttgacgcaaattccatgcagcgcatccatttcgtactgcaaatgcggcgcaattaaaaaatttcctcgtcgttgttaacaatcttgggcgctaaaaagcacgccaacacgcccacgtccttaatgcaatattccaacttgaatggcagttcctcggacatgtatattgtcacggtgggcgccaaaggagcggctttagcaaaatgacacaagtaatcgcccgcaaaagtgtgcgttactgtttgctttgctttgagaacggaaaaattttcgttgtccgcgctcatctgcacgtccgccgagccaatgtcgccatttgctctaaactgcagacccttcttggaacacgacacaataatatcgtggtcgaattgcgtcatgtctttgcacacctgcgcaaactcgacgctcgacatgtggacgacgcaatcgtaatcgctatccggaattcccaaatgttccacgtcgatgcacatcaacttgagcgtgtacgtgcagattctattgtcgttgttgaacacgaacgccatcacatcgccctgatcttccgctttcatcagtacagagctgcgctcgttaacgcatttgacaattttacttaaactgtttatggacacgttgagcgtcacgttgcggtcacatctatattttttgaaaccctcggcgtgtagttgcaacgacacgagcgcgacatgcgaggtgtccataacctgcatgcttacgcctcgattatcacaatcaaaagtagcgtgcggcagcagatccttaaaagtttccaccagcctcttcaaaactgcgccggttttaaattccgcttcgaacatttttagtagtgattctaattgcagctgctctttgatacaactaattttacgacgacgatgcgagcttttattcaaccgagcgtgcatgtttgcaatcgtgcaagcgttattaatttttcattatcgtattgttgcacattaacaggctggagaccacgttgaactcgccgcagttttgcggcaagttggacccgccgcgcatccaatgcaaactttccgacattctgttgcctacgaacgattgattctttgtccattgatcgaagcgagtgccttcgactttttcgtgtccagtgtggcttgttttaataaattctttgaaaatattgtcgggtgtattattaaatagcatgtatggtatgttgaagatgggataacgcttggcgtgcgggtcgtcatgatttccgccgcgcaccacatatttgcgctcaattttatcgaaattggactggcgagacaaaaacgaaacgggcgacaggcatatttgggcgtgcgtaccatcttcggccatccactcggtcaggtcttcgctgcggttaaacacacctttctgaccgtgaatgccacatatttttattccttccaaatcgttggtggacgtgactatgactattttaagcataacgttgtcgccgttaaccaccatgctggcgtcgagtttttcaattttttgatttttaatttgtctaaagtaaacgtacactttgtaaacgttaaaattgccgttggtgcacgtttcaattttgtaccgtcggccgtcgtacacccaattaatctttgcgttgctcaccaacacaccggccatgtacagcacaagtccgtcgtctagcgcaacgtaatttttgtcgctactattcgtaaactttactaaacacgactgcttggggccgaccacaagcttgcccttcaatttgttcactttgttgttgtataaacaaatgggcagcgcaatgtgcggaatgtacggatcttcggcggtcatgagtttattgtctcgcaccaacgtccacaatttaaacattttattgttgagcaaaatggacttgtttaccgccacagagtagccatttggtaaacccgatacgcaattttcctctttgtactcaaacacaggcatggcattctttagattggttagggacacaattaatttgggtacgggtgtggtatgaaataaatgtataaaattacgataataatactgctccaacttggacatgagcgatttgacgtcatcgttttctacgatcgtacactgaataatgggattatagtatatagaatgtttatagtggtattcgtagggtgtcaacaatacgttaatgtcggcttcgttgttcacccgcaacttttttttgatgcatatcattccttcgtgatgattaacgtaaagtattctgtctgtaatcttcaattcgatgggcgccatgtttcttttcatagtgtacacgataaacgacgtgtttgattttaaacattttaaatttgtgggtctatcattaaacgcgatcagcaacgagtcgtcttgaacgtcgttgaggtcgtccacgaacgcgaccagattgtgttttagcaaatattgaaatttttgcgcaaccatttcgtagtccacgttgggcaaacatgcgttgcggcaaagaaaaaactttttgcccgccacggtcatttcgccgtgaaaaaaactgccaataaatttcacaaaatcctttttttgcttcaacattttctggcgcatgctgtcgttggtgattcgcgccacctcgttgccgacgcgatattttaacacgggcaacgaaatttcaatattgttattgctgctgttgtcctgttgattaggaaagactttgcgttgcttgctaaaagttttcgatacgcaatatatgagacgcccgttgactatacaatcgacaatctttttcgactctttgttgtacaagacgctttgaattttacgacgcttgttcgccaccgtgtacgcgtcgtcgtcggccgtcttgtcgagaactcgttgatagttttgcaaaattgtcgaagttaataacagttctattaaataggcgtgcttgtatacaattttgttggccaaactgtctatagaatagtttatgtcgtgattcataataatttttatgtgttccacgagttgttgcttgtgaagcgtgttgtattcgaagagaaaatcgagcggtttccatttgccgctgttggccagatatgtttccagcacagaatttaaatcttccgtcaccacgtaatcgctagcgtacacgtctcgagcaaacaggacgtcgtcttgtttgtcgtaaactagttggattgcgcgattgatgtgcttctcttgatccacgttgccgtacaaaaacatgcgtttgcaatgtttggcgtatagcttgtcgtagaaattgtgcaccaaaacgttgttgttcatcattatgttgggaaaactcaaaaatctgccgtctagcataaaagttccgttaatattgttgtttgcgttgacatcgtcagtttctctaaattgcttgtctaagcgcgtgccgaatataacgggcacacatttatgcattacgcaactgagctgttcattaagagcgcaacacaaataagacttgcgttcttgaatagcgcaaaaaagcatacgtttattgctgtttgtagcgcaatcaaaagtatattttaatttgtatttattttcaattctatcgtacaactcgttgaaatcttgaaccacgtccgtcatcgtgaagcgattactgcgcactaattatgtctaaacgtgttcgtgaacggtcggttgtttcggatgaaacggccaaacgcattcgacaaaacgaacactgtcatgccaaaaatgaatcttttttggggttttgcaacttggaagaaattgattattatcaatgtttaaaaatgcaatacgttccggaccaaaagtttgacaacgattatattttaacagtgtacagaatggccaacgtggtgacgaaacaagttagaccgtataacagtatcgacgaaaagcaccattacaacacggtacgtaacgtgttaattttaataaaaaatgcgcgtttagtgcttagtaatagtgtcaaaaagcaatactatgacgatgtgttaaaattgaaaaaaaatacagacttggaatcgtacgatccattgattacggtctttttacaaattggcgaatctgtaaatgaagaaatacaaaaactcagaaaagctttggtcaatttttttactaataaacccgacaagtcggatataaacaacccagatgtagtttcgtatcaatttatttttggcagagtacaaaaattgtataacagggcaattaaacaaaaaactaaaactataattgtaaaacgtcctacaactatgaacagaattcaaatagattggaaaactctttccgaagacgaacaaaaaatgactagacaagaaattgccgaaaaaattgtaaagccttgttttgagcaatttgggactatattacacatatacgtatgtcctttaaaacacaaccgaattattgtcgagtatgcaaactcagagtcggtacaaaaagccatgactgtaaatgacgacactcgatttacagttacagagttttccgtggttcagtactacaacgtggccaaaacagaaatggtgaaccagcgaattgacataataagcaaggacattgaggatttaagaaacgctttaaaatcttacacataaattaaaatatcgaacaaaggaaaaaaacaattgtaacaaaaataatttacattaaaatttacaagtttttttctagtgtcgtatttttttacaatgcatctgttgtccgtcgagcattgcaaacatattgtggacggcgcaaaatagcaaataaaaggcacgtccgcgctctcccacgctattctaaaacgatgaatccatattaatttttcattgtcgccaaacgtcgctccgctggcctccttccaataacaaatactcagaaacacaaacatgtacaattgctgtcgcggcgttaattgtcgctgtttttccaaatagtctattatgggaaacaaacacttgtcacaacacaaatactcgttaattgtcacaaccgacaggcacatttggcaaaatgcgtcgcaatttttgtacggacgggattctatgcaaagttcgttgtccatgacgtcttgggtccactttttcaacaagacacttttatatttgtgatttgtacaactttggtacgtgttagagtgtttttgataagctttgataagtttaaaactgttggagtaaggccacgtcattatgttctgcaccttttgtttaaaagacagaaattactatatgttcaaactatttaaagattattggccaacgtgcacgacagaatgccagatatgtcttgagaaaattgacgataacgggggcatagtggcaatgcccgacactggcatgttaaacttggaaaagatgtttcacgaacaatgtattcagcgttggcgtcgcgaacatactcgagatccctttaatcgtgttataaaatattattttaactttcccccaaaaacactagaagagtgcaacgtgatgcttcgagaaactaaagggtttataggcgatcacgaaattgatcgcgtttacaaacgcgtttatcaacgcgttacacaggaagacgccctggacattgaactcgattttaggcatttttttaaaatgcaatcatgacgaacgtatggttcgcgacggacgtcaacctgatcaattgtgtactgaaagataatttatttttgatagataataattacattattttaaatgtgttcgaccaagaaaccgatcaagttagacctctgtgcctcggtgaaattaacgcccttcaaaccgatgcggccgcccaagccgatgcaatgctggatacatcctcgacgagcgaattgcaaagtaacgcgtccacgtaacaattattcagatcccgataacgaaaacgacatgttgcacatgaccgtgttaaacagcgtgtttttgaacgagcacgcaaaattgtattatcggcacttgttgcgcaacgatcaagccgaggcgagaaaaacaattctcaacgccgacagcgtgtacgagtgcatgttaattagaccaattcgtacggaacattttagaagcgtcgacgaggctggcgaacacaacatgagcgttttaaagatcatcatcgatgcggtcatcaagtacattggcaaactggccgacgacgagtacattttgatagcggaccgcatgtatgtcgatttaatctattccgaatttagggccattattttgcctcaaagcgcgtacattatcaaaggagattacgcagaaagcgatagtgaaagcgggcaaagtgtcgacgtttgtaatgaactcgaatatccttggaaattaattacggcgaacaattgtattgtttctacggacgagtcacgtcagtcgcaatacatttatcgcacttttcttttgtacaatacagtcttgaccgcaattctcaaacaaaacaatccattcgacgtaattgctgaaaatacttctatttcaattatagtcaggaatttgggcagctgtccaaacaataaagatcgggtaaagtgctgcgatcttaattacggcggcgtcccgccgggacatgtcatgtgcccgccgcgtgagatcaccaaaaaagtttttcattacgcaaagtgggttcgaaatcccaacaagtacaaacgatacagcgagttaatcgcgcgccaatcagaaaccggcggcggatccgcaagtttacgcgaaaacgtaaacaaccagctacacgctcgagatgtgtctcaattacatttattggattgggaaaactttatgggtgaattcagcagttattttggtctgcacgtacacaacgtgtagcatcgccagtatttaacagctgacctatttgttaaacaagcattcttatctcaataattggtccgacgtggtgacaattgtatccacaatcatgaaaaaagtagcgcttggaaaaattatcgaaaacacagtagaaagcaaatataaaagcaacagtgtgtcgtcgtcatcgtcaacgggcgccagtgcaaaattgagtttaagcgaatattacaaaacttttgaagcaaataaagtgggccagcacactacgtacgacgtggtcggcaagcgagattacacgaaatttgacaaattggtgaaaaaatattgacatgctgcgatcaatcatgcgacgttttaagagtacaaacaatctcaacaaaaaaccctccgattattatgtagtgttatgtccaaagtgttattttgtgacgtcggccgaagtgagcgtggctgaatacatagaaatgcataaaaattttaacacgaaattcgccgatcggtgccctaacgattttattgtgaccaactctaaaagttggaataatcatgaaaattgttctgccctattttaccctctgtgttaataaagtttgttgtttgtattttgtggttttatttatttacgctagatattgggtttaaggttcttagaaatagagttgtattttccctaccaaaagggatttgagcttcatataaatacaattttcgctcgacaagcggtttatttcactcggaggtattatatcaggcagtcgaacgtgcgcgatgaaacatcccgtttacgctagatatttggagtttgatgatgtagtgttagatttgactagtttaatatttttagagtttgataacgctcaaaatgaagagtacattatttttatgaatgtaaaaaaggcgttttacaaaaactttcacattacttgtgatttgtcgcttgaaacgctgaccgtgttggtgtacgaaaaagctcgcctaattgtgaaacaaatggagtttgagcagccgccaaactttgttgattttatcagtttcaacgcgaccgacaacgacaactccatgataatagacttgtgttccgacgcgcgcataatcgtggccaagaagctgacgcccgacgaaacgtatcatcagcgcgtgtccggatttttggattttcaaaaacgtaactgcatacctcggcccccaatcgagtcggacccaaaagtgcgagacgccttggatcgtgaactagaaataaaactatacaagtagaaaaaaattaatttattaatagttgtaataattatcttcgtcctcatcttcgctggtgtcataatgcggtggtgtgtttgtgttttgttttaatcgtttgcgcgtcgacaccacttcgccgataggaaattttttggatttcgcattaaatgcccgcttagcgacgcgccgtttacgactactaaacatgttgacgcgctcgtcgtcttcagtgtcataatccgtgctagtgttttcgttgttattttctatgagacgatcgtttgattgagttttcgtagaattgtccgcgttatcgtcgctttcgtcgatgtcgtccctaactatctcgtaggcggctttgcgcggaatccaagaattttgcaatgtatctattttaacgtacttttcttcgagcgcttttctagctttatgcatagcaatgtcttcgtcgccgccgttcattttatgatactttgtaaacgtctcgacgaataactttttggcgcgaggaggcattttttcattgtataacatatcgggaatttgatacattgtaattagaattaagcaagttcgtcttcggttgtactgtattcggtttctgtatctgtagtggaatcttctgtactagtagtagtgtcgctattgttggcgtcaggccttggctgccatttaccgtctatcaacatgtattttttcctaacagcacaacatgctagcttggtagctatctgtgtcgacttatatttttgtaaactacgatcgtagaatttttcaaatatcctcttaccgttatagggaaggttttgataatatttaggcaacatatcaataaaagacaatataaaaactttgtgtttgtgttttatttatcacataaaatggacgtctggcaagaatcacaaccaatattagtgttttttttcttacattacgagattcaacttgatactaaaattaattattaattaaattaaattaaattttgaagcattttttcgctatcgttttcagactcaaaattatcgacgctatcgctatgaaaagcgtaatatttgttggctttgagatattcgatattttgctcatttttaacaataaacacgcgactcttttcgtcgcgtctcaccataacaccgtttttacaaatagaaatgtatttgtaaaacggcaacagagcgtcgcgagtttttttaagtaacagcttttgctccgctgtggcggccacaaatatttttacgggcccgtcgtaattaatgtttaaattaaaatttttaagtcgacgctcgcgcgacttggtttgccattctttagcgcgcgtcgcgtcacacagcttggccacaatgtggtttttgtcaaacgaagattctatgacgtgtttaaagtttaggtcgagtaaagcgcaaatcttttttaaataatagtttctaatttttttattattcagcctgctgtcgtgaataccgtatatctcaacgctgtctgtgagattgtcgtattctagcctttttagtttttcgctcatcgacttgatattgtccgacacattttcgtcgatttgcgttttgatcaaagacttgagcagagacacgttaatcaactgttcaaattgatccatattaacgactagcttctgcccgcgacttcgtacgcggaacatgtcgcttatgccagcgataacgggtcgtcaaaatgaaagatcttaaacgtctgatgttgaattctaagagcccggggaaacggcgggttgcgcgaaactattcgagatgtttcagacttatcataccaaaaggcaatgggcattgcattgactgccttttaagaatgtatggacaacgccatctatcggtaaaagtgaacacttatcggagctagttacgcgcgagaaagctacataaagcagtccgtgtgaaaaacagcgacaccgtcacacaacgaaggccagaaacagctttaattttcatcgatttagcttaaaaactgacggagtttgatagacacttaccccccctttttcacccccggtaaggcagaatttccaaaaataattattgcgtcattcttaatttctaaccaaatagccaaatattaattttgattgaattagcttcaaaactgacggagtttcatacaaacttaccccctcctttttacccccttacagagcgaatttccaaaaaaaatatagcctatatgttattctgatatataagctatatgtctgccaagtttcatctaaatccgtccagtggatcctgagattagcgtgtgcaaacagacaaacaaacaaacaaacattcaaacatacaaacatacaaacagacaaaatttttttttcgaattcttactcttctttcaatttctaataaccctatatatttcattttgtaaaaatatgaaatgtacagacacgatttttttactgttttattatatgtatagatatcaacccgatgcgtatatggtgcgtaaaatatattttttaaccctcttatactttgcactctgcgttaatacgcgttcgtgtacagacgtaatcatgttttcttttttggataaaactcctactgagtttgacctcatattagaccctcacaagttgcaaaacgtggcattttttaccaatgaagaatttaaagttattttaaaaaatttcatcacagatttaaagaagaaccaaaaattaaattatttcaacagtttaatcgaccagttaatcaacgtgtacacagacgcgtcggcaaaaaacacgcagcccgacgtgttggctaaaattattaaatcaacttgtgttatagtcacggatttgccgtccaacgtgttcctcaaaaagttgaagaccaacaagtttacggacactattaattatttgattttgccccacttcattttgtgggatcacaattttgttatatttttaaacaaagctttcaattctaaacatgaaaacaatctggttgacatctcgggcgctctgcagaaaatcaaacttacacacggcgtcatcaaagatcagctgcagagcaaaaacgggtacgcggtccaatacttgtactcgacgtttctcaacacggcctcgttctacgccaacgtgcaatgtttaaatggtgtcaacgaaattatgccgccgaggagcagcgtaaagcgctattacggacgtgatgtggacaacgtgcgtgcatggaccacgcgtcatcccaacattagccagctgagcacgcaagtctcggacgtgcacattaacgagtcatccaccgactggaatgtaaaagtgggtctgggaatatttcccggcgctaacacggactgcgacggtgacaaaaaaattattacatttttgcctaaacctaattccctaattgactcggaatgccttttgtacggcgaccctcggtttaatttcatttgctttgacaaaaaccgtttgtcgtttgtgtcacaacaaatttattatttgtacaaaaatattgacgcaatggaggcgttgtttaaatctacaccgttggtttacgcgctgtggcaaaagcataaacatgagcagtttgcacaaaggctggagatgttgttgcgtgatttttgcctaattgccagttcaaacgctagttatttactttttaaacagctcacacagctcatagccaacgaagaaatggtgtgcggagatgaagaaatattcaatttaggcggccaatttgtagacatgattgaaagcggtgccaaaggcagtcaaaatctgattaaaagcacgcaacaataccgacagactttaaatacagatattgaaactgtgtcttcgcgagccaccaccagtttaaatagttacatatcgtctcacaacaaagtaaaagtgtgtggcgccgacatatatcataacacggttgtgctacagagcgtgtttattaaaaataactatgtttgttacaaaaacgacgaacgtacaatcatgaatatttgcgctttgccctccgagtttctgtttccagaacatttgctcgacatgtttattgaatgataatataaatagagcgcatttgattaaatgcaatcagtgttttattaattttagagcaacatgtacgataaatttatgatctatcttcacttgaatgggctgcacggagaagcaaaatactacaaatatttaatgtctcaaatggattttgaaaatcaagtagccgatgaaatcaagcggttttgtgaaactcgtctgaaaccggcaatcagttgcaacactttaactgcggaaagtctcaatacgctcgtagacagcgtagtctgcaaaaatggactgttaaatccttacgccaaagaagtacagtttgctttgcaatatctttttgacgatgacgaaatatccaaacgagatcaagatggctttaaactatttttattacataattatgacaagtgtgaaaatatggaagaatattttttaattaacaattttagcatagcaaactacgaatttgaagacatgtttgaaattgttcgtatcgattgtagagatctgttattacttcttgctaaatataatatgtaattaaaattttgtttgttttattgaaatcctggattaaaaaatgacgaataatttgatttgcgtgcacgccaacaagattcttcgtcattatgatcaatgcgtgcatcaagtttatgcttttgtaattggcttctgaccactttagccatttgagcgtatctgcattcgtcgtctagagtttcaaacaccagatcggcgcaattataaaatccttcacccacgggatctatgcgctgccaacgcacatacattacaaattgatttgacctgtacggtattactacgggtatagaatagactagactgttgtcacataatgaatcgcccggatttggaattaaatttgaatcgttaccacctatgtattctaattcgttccaagttattggattgcgacgatcccagtttgatttagtaataaacacttcaaaatagctgggctcgtgtatggctgttggacaaaaatgaacattcatctgataaaccggttgatagcgatttaaatatagcgtatttggcctccagttgttaaaaggttcgtccattccgcttttatcaccaaacacagaattgcgatcgtttgaaccggcaccgcaaagtgtgtgcggcacaaccctttgtttgattaggtcaaaatcgtcataattaggaccggccacagccgcgtattccatatactgttgaaacatgtattgcgctgtggaagcggccgccccggattctaaatcgagagctcgatatttataatagactgatttgtaagcattgcggcacgcggcgtcgggaatgttatcgccattgtcgggccaataaaagtttccatctttaaaacatttatattgacgggccgtcggcacggacaaatagccgtgagagcgcactgccggcgcgtgaatcgcagcaaacaatgcaattaataatgcaatcattatgattatacttatagaacactaatcggaataataaccgctgtcgtaatcttggtcaaaaacgttatgttgaaacataataacaccttacagtaacatacaataaaacaacatagtatcgtatataattatcaactttattttttcattttatacaaacaaaatttatacgtattgttagcacattgagtgtcattttcgctgtctgaactatcacaatcatcgtcatcatcattatcatcattgtcatcgtcgtcgtcacgtttgcgtttgacactgcattttttttggttaattttcactaacactggttcttttcgatcgtacaattgattctgcatgtacttttgcatgatcgcggtaaaacactttgcaattttatccttttgttcgtcgccaaatatttccagcaactcgttcataaatgtgcacaaaatgcccatgtgttttatccagctgattcgcatttttactggatcaaacaaacgcaaggggtacgctttttctgttaccttgccctcgatgtctatcaaaaggtacgggatacgatctccgttgccgggcacaaaatccgtgcctttgttaaccaaaatttctctacaatgccgagccaccgtaatcacgcgtcttttgggtgacggaccctcattatcgtcagttgatttgcgttttttgcccgggttatcgttataggtcatactaaagctgtagtcggtcaacgattttgatttggcaaactcatcatagtattcataaaaactagtctgtaaactttgcaaacatttgtccatgtccaaatgacgcaatatttgttccactgccgtcctaaacgcgattctcataaaaacgggcatatcctttttaactaaccaacccttgtatacgattttattctcactgttgagatagcaatattttttcttttttaatagtattaaaactttcattaaattttcaaatgccattttgtaaccgtccgtaaatgagttattaacgcgtgtctcaacatgtgtgcatatttgttttaatgtgtcggtttcgttggatatttcgttatagttaaatgtgggcaaaacaaatgtagaatctgtgtcgccgtacacaactttaaaagtgatgctgttcagattgaatttttctaaaatctcagggtcgttgctcaaaccttcaatcagagaaatggccagccgcaactgattgcgaccaactctagtgatgtagtttgcaagcactttgtaaaaaatgccataataaccgtatatgctattagcggtgcgcttcacggaattttgtttttgatcgtacagatcgtacaagaatgccgattcgctttgattgtcgcgattctttttaaatttgcacctttcgcttaacaattttaataacaatttaacaactattgcacgcgagttgtggttcaaatacacgttgccgtcttcgcataaaattaaattggacaaacaagcacaaatggctatcattatagtcaagtacaaagaattaaaatcgagagaaaacgcgttcttgtaaatgcctgcacgaggttttaacactttgccgcctttgtacttgaccgtttgattggcgggtcccaaattgatggcatttttaggtatgttttttagaggtatcaattttcttttgagattagaaatacccgctgcggctttgtcggctttgaattggcccgatattattgacagatcgtttttgttaaaaaaatacgggtcaggctcctctttgccagtgctctcgttaatgcgcgtgtttgtgatggctgcgtaaaagcacgccacgctaatcaaatgcgaaatattacatatcacgtcgtctgtacacaaacgatgcaatatacattgcgaatatacagaatcggccattttcaatttgacaaacaattttatcggcaacatgcaatcctgcacgttgtacttggcaatcacgtccagccgtcgagtgttgtacatcttgaccatttcggtccaaggcaaatcgattttgttttcacccaaatagtaactactgattgtgttcaattgaaagttttcaactttatgctgattagaatcgctgctaaaaaatttatacaaatcaatgtgaatgtaatagttaaaataatacgtgtccactttgttgcccaacttgtttataaacagctttgtcgtcggcgccgcagccggcaaatcgtaacgctttaatagcattttggttttattcaatcgtccaagtatatagggcagatcaaatacgtctccgttaaaatccaaaatcacatcgggatttgtaatttttatcatgtcaaaaaacgctgtaatcatgtcgatttcattttgaaacatgaccacatacgtgtcatcgtcataggtctctggaatctcggtcggcagcttgtgatacataaaacaaaattttgcatactcgtcgtttttgtacaccacaaatcctatagacattatgcaatcaaccgatgctttcgacatgttgtggccgtccgaatgagtctcaatgtcatagcacgacaaaacgggcatgatgccgctggttaaagtcatttcatcgaccaactcaaagtcttcattgaaatgttgcaaattaaacatgcgcgtcgtcgatccaccgacatagttattttggcagcgttgtgttttcttgaatcgcatataggcgccttccacaaacggcgtttgcatgtgtacgcgattaacattgtgaagaaacttgtccaaacacgccgcgttgtccgatggcgctgctttgtttctttcgtatttaatcacgtttatcttgttcaaataatttccttccacgcccggcgccacaaacgtggtgtagctgatgcacttgttgcggcaagacggaaatatgtgcttgtcgtagcattgtttgtaagaatacaaatttagttttactttaaagtaaaactgcagcactcgttctttgatatttgtattacaaaatgcaaacaagcaaccttgtttttcatcgtaatgcaaacgaatgatacgaaacgtatcggctgaagtaatattaaattcccctggttttgcatattctgcaaagcgcgttttgagttcattgtaaggatatattttcatttttaaatatgcagcgatggcccaaatatggaggcacagacgtcaacacgcgcactgtacacgatttgttaaacaccataaacaccatgagtgctcgaatcaaaactctggagcggtatgagcacgctttgcgagagattcacaaagtcgttgtaattttgaaaccgtccgcgaacacacatagctttgaacccgacgctctgccggcgttgattatgcaatttttatcggatttcgccggccgagatatcaacacgttgacgcacaacatcaactacaagtacgattacaattatccgccggcgcccgtgcccgcgatgcaaccaccgccaccgcctcctcaaccccccgcgccacctcaaccaccgtattacaacaattatccgtattatccgccgtatccgttttcgacaccgccgccaacacagccgccagaatcgaacgtcgcgggcgtcggcggctcgcaaagtttgaatcaaatcacgttgactaacgaggaggagtctgaactggcggctttattgaaaaacatgcaaacgaacatgacttgggaacttgttcaaaatttcgttgaagtgttaatcaggatcgtacgcgtgcacgtagtaaacaacgtgaccatgattaacgttatatcgtctataacttccgttcgaacattaattgattacaattttacagaatttattagatgcgtataccaaaaaacaaacatacgttttgcaatagatcagtatctgtgcactaacatagttacgtttatagatttttttactagagtcttttatttggtgacgcgaacaaattttcagttcaccacttttgaccaattgacccaatactctaacgaactttacacaagaattcaaacgagcatacttcaaagcgcggctcctctttctcctccgaccgtggaaacggtcaacagcgatatcgtcatttcaaatttgcaagaacaattaaaaagagaacgcgctttgatgcaacaaatcaccgagcaacatagaattgcaaacgaaagagtggaaactctgcaatcgcaatacgacgagttggatttaaagtataaagagatatttgaagacaaaagtgaattcgcacaacaaaaaagtgaaaacgtgcgaaaaattaaacaattagagagatccaacaaagaactcaacgacaccgtacaaaaattgagagatgaaaatgcagaaagattgtctgaaatacaattgcaaaaaggcgatttggacgaatataaaaacatgaatcgccagttgaacgaggacatttataaactcaaaagaagaatagaatcgacatttgataaagattacgtcgaaaccttgaacgataaaattgaatcgttggaaaagcaattggatgataaacaaaatttaaaccgggaactaagaagcagcatttcaaaaatagacgaaactacacagaggtacaaacttgacgccaaagatattatggaactcaaacagtcggtatcgattaaagatcaagaaattgccatgaaaaacgctcaatatttagaattgagtgctatacatcaacaaactgtaaatgaattaactgcaactaaaaatgaattgtctcaagtcgcgacaaccaatcaaagtttatttgcagaaaatgaagaatctaaagtgcttttagaaggcacgttggcgtttatagatagcttttatcaaataattatgcagattgaaaaccctgattacgtgccgatttctaaaccacagcttacagcacaagaaagtatatatcaaacggattatatcaaagattggttgcaaaaattgagatctaaactgtcaaacgccgacgttgccaatttgcaatcagtttccgaattgagtgatttaaaaagtcaaataatttctattgtaccacgaaatattgtaaatcgaattttaaaagaaaattataaagtaaaagtagaaaatgtcaatgcagaattactggaaagtgttgctgtcacaagtgctgtaagcgctttagtacagcaatatgaacgatcagaaaagcaaaacgttagacttagacaagaattcgaaataaaattaaacgatttacaaagattattggagcaaaatcaaactgattttgagtcaatatcagagtttatctcacgagatccggctttcaacagaaatttaaatgacgagcgattccaaaacttgaggcagcaatacgacgaaatgtctagtaaatattcagccttggaaacaactaaaattaaagagatggagtctattgcagatcaggctgtcaaatctgaaatgagtaaattaaacacacaactagatgaattaaactctttatttgttaaatataatcgtaaagctcaagacatatttgagtggaaaactagcatgcttaaaaggtacgaaacgttggcgcgaacaacagcggccagcgttcaaccaaacgtcgaatagaattacaaaaatttatattcattttcatcttcgtcatacttcaacagtcccaacacgttcatgttgtgattctcgccgttctcgacagttacgtaaatagttactttgattaaattatcttccagcagcattgagatttgattgaaatccgcacatagcttttgtagcgaatccgcttcggtttttttatttgtgttgacgtagaaaacagatttgttccatttgctcaagtcggaagaggtagaacagtcatccgaatcggcaatgttcaactcgtcgcttttaaattgcacaataaacttgttatcgcccatgtcattttcttccaattcgctttttaacacatttacattgtacgaagcaacgtgtttgttcgatcgactaatgttgatctttgcgtttgtgcaattttgcaaatttgaatatgcttcgctttctttagcctcgcacaattcgatgcgcgtagagttgaccacgttccaattcatgtacacgtttgatccattaaaaatttgttgacactttatattgtaaatggtaaagatttggttttcattgtcttttaaatatttaaacacctcattgatgtcgtcagacccctttatattgttcttgaatagatttattagtgttttcgcattgacagaacattccacttgaaccacgtcgggatcgtcgttgagatttttgtacacaacctcaaaaacaactttgtacaaaccgctgttgattttcttgtagataaatttgtactttacaataatattgacgccatcttcattttcaaaatgtttgttagtcaaatagtcgctcatgggggttgcagtttcaatttccatttcacattctttgtattcgttgatctgaatcatttgactaaactttgttttcacataatttaaactaatgtcatagcacttgccttcttccatgtctttgaaagattgcgaatcgccgtagtattcttgaattttgttgtcggacattattcgaaaagtgtaatggtattcattatcgatactcaacgtcattttgctcatcaatttaccactaatccttttgtaattttctctaatcttcttggggctactggccatagccatgcgttttataagcggctcaccgctactttctccagacaaagatcttttggtcgccatattgctgttgtcgatatgtgggaatctatccgatggcaaatactgaatggcgacgaaatcgaagtgtcgccagagcaccgttcgttagcgtggagggagttgattataaacgtggccagcaacacgccgctcgacaacacgttcagaacaatgtttcaaaaagccgattttgaaaatttcgactacaacacgccgattgtgtacaatttaaaaacaaaaactttaacaatgtacaacgagagaataagagcggctctgaacagacccgtccgatttaacgatcaaacggtcaatgttaatattgcgtacgtatttttgttctttatttgtatagttttgctgagcgtgttggtcgtctttttcgacacaaacattgcgaccgacacgaagagtaaaaatgttgcagcaaaaattaaataaactcaaagatggtttgaacacgttcagcagcaagtcggtggtttgcgctcgctcaaaattatttgacaaacgcccaacgcgcagacctagatgttggcgaaaactatcagagatcgacaaaaagtttcatgtttgccgacacgttgacacgtttttggatttgtgcggcggaccgggcgagtttgccaactataccatgtcgttgaacccgctttgcaaagcgtatggcgtcacgttgacaaacaactcggtgtgcgtgtacaaaccgacagtgcgcaaacgcaaaaatttcacaaccattacggggcccgacaagtcgggcgacgtgtttgataaaaatgttgtattcgagattagcatcaagtgtggcaacgcgtgcgatctggtgttggcagatggctcggttgacgttaatggacgcgaaaacgaacaagaacgtctcaactttgatttgatcatgtgcgagacgcagctaattttaatttgcctgcgccccggcggcaattgcgttttaaaagttttcgacgcgtttgaacacgaaacgatccaaatgctaaacaagtttgttaaccatttcgaaaaatgggttttatacaaaccgccttcttctcggcctgccaattccgaacgctatttaatttgtttcaataaattagttagaccgtattgcaacaattatgtcaacgagttggaaaaacagtttgaaaaatattatcgcatacaattaaaaaacttaaacaagttgataaacttgttgaaaatataacgtgtgtataaaaagccagcggcttcaaatcaggcatcattcaacatggattcgctagccaatttgtgcttgaaaaccctgccttacaagtttgagccgcctaagtttttacgaacaaaatattgcgacgcatgttgctacagatttttaccaaaattttctgatgaaaaattttgtggacaatgcatatgcaacatatgcaacaatccaaaaaatatagattgtccatcatcatatatatcgaaaattaaaccgaagaaagaaaacaaagaaatatatattaccagcaacaagtttaataaaacgtgcaaaaacgaatgtaatcaacaatcaaaccggagatgtttaatttcctattttacaaatgaaagttgtcaagagctcaactgttgttggttcaataaaaactgttacatgtgtttggaatataaaaagaatttatacaatgtaaatttgtatacgattgatggtcattgtccttcgtttaaagccgtttgtttttcatgtataaaaagaatcaaaacgtgccaagtttgcaatcaacctttattgaaaatgtacaaagagaagcaagaagagcgtttgaagatgcagtcgctgtacgcaacgttggccgatgtagatttaaaaatattagacatttacgatgtcgacaattattctagaaaaatgatattgtgtgctcaatgtcatatatttgcacgctgtttttgtaccaataccatgcaatgtttttgtcctcgacagggttataagtgtgaatgtatatgccgacgatctaaatatttcaaaaataatgtattgtgtgttaaaagtaaagcggcttgttttaataaaatgaaaataaaacgtgttccaaaatggaagcatagtgtagattatacttttaaaagtatatacaagttaataaatgtttaattttaaggatattgttatggaataaactataaaatgaatttgatgcaatttaattttttgatactttccacagacggtagattcagaacgatggcaaacatgtcgctagacaatgaatacaaacttgaattggccaaaacggggctgttttctcacaataacctgattaaatgtataggctgtcgcacgattttggacaagattaacgccaagcaaattaaacgacacacgtattcgaattattgcatatcgtcaaccaacgcgttgatgttcaatgaatcgatgagaaaaaaatcatttacgagttttaaaagctctcggcgtcagtttgcatcacaatccgtggtcgttgacatgttggctcgtcgcggtttctattattttggcaaagccggccatttacgttgttccggatgccatatagtttttaaatataaaagcgtagacgacgcccaacgccggcacaaacaaaattgcaagtttctcaacgcaatagaagactattccgtcaatgaacaatttggcaaactcgatgttgcggaaaaagaaatactggctgccgatttgattcctccgcggctaagcgttaaaccttcggcgccgcccgccgaaccgctaactcaacaggtctccgaatgcaaagtttgttttgatagagaaaaatcggtgtgtttcatgccgtgccgtcacctggctgtgtgcacggaatgttcgcgtcggtgcaagcgttgttgtgtgtgcaacgcaaaaattatgcagcgcatcgaaacattacctcagtaaacattgcaaacaactacgacattctttaaaaataagctatatataaatattgcattgtatgacaaaaaaattattaacctactgcaaagtaaaacttgtaaaaggcttttcaaaaaaatttgcgagtttattttgtcgctgcgtcgtgtcgcatctaagcgacgaagacgacagcgacggtgatcgctattatcagtataataacaattgtaatttcatatacataaatattgtaaaataaaagacatattattgtacataatgttttattgtaattaaattaatacaccaatttaaacacatgttgatgttgttgtgaataatttttaaatttttacttttttcgtcaaacactatggcgttgctttcgattagttttttcgttagcatttcatctaaaaaatcaaactgtttgcccggcgcgtttagggattctatggtgtagtcgggcgtgtcgctgtttagatattggtccacttcgcgcattatgtccaagacgttgttctgcaaatgaatgagctttgtcaccacgtccacggacgtgttcatgtttcttttttgaaaactaaattgcaacaattgtacgtgtccactatacaattcggcttaatatactcgtcggcgcaatcgtatttgcaatccaatttcgtgttcaacaaattggtgatgatatctttgaacgtgcacgttttcaatttgtccttatcggccaacgcaagtttcaattcgctctgtaaagtttctaaaattttgtctttattgttgtcaaattcgtgcgtgttgcgttccaaccacagtttgaacggctcgtccacaaaaatgctgcgcaagacctcgtacaactgtctgcctaacgtgtacacttgctcgtattctttcatgctgacctctttgctaacgtacattactaaaaaatctacaagtattttcaaacatttgtaataggcgacgtattttgatttaagttttaaaccgtccaccgtgtattcgtccacgttcgcatcgaccacttttcgattattatcgccgcttgttgccgacgcgtcggcctgttcggttttaactatatccggttcaatatttaaagtttcaaaagatttaatggcattcataaaatcatctttttgctttggcgtggtcaatggtaaatttatcgaggagttgtcgtccgtgtgctcttcgggcacgctgttcagacgtaacgtaatctttttgggatcgtcttcatcgggtatcaaatcggctttaattttattagaattgagcaacgacatggtggtcgcttgtaaatttaataaattaattaaagactgaaattgtatattgcacaaatttattttcatttttattgatcttactattaatacgctggcagttggtatgcttcatccatttttgtgactagaaaatttgctaaaaaactgagctcgtcctgtgttaaaacgttgtcgtccacgaatctatgcaatgtaaatgttacactgacattgtttaacaatgcatgtattaaaaaatcaacctgtcgcctactgagtttattagaagagtcgaccgtttctactagtttgtagattttgttattttcaatttcattgtttaaaaacatgttaactactcgtttgagtttaagcgaaaaatccttgtccggatagacttgttcgcacagccaattgctaagagtggttttgaccacggacaccttggtggtgaacgtcgtcgatttgaccagttcggtgaaaaagtttttcattaaattggacattttaacaaacacttatcaatctattgagctggtatttttgtttagaatcgcatcaagcgcttgctcgatctccaatttttttcggacgctcttagctttatgactcggtatgtcttctacggtagactcggtgttcttacttataatggccgggctgacgataataaacacgagaaacaatatgagcagatacaaaaagatgctgttttcttttttgtcatacactaggctaaatatggccagtgcacccaacaacaaatataaattcatttttattcccttactctattcgttgcgatagtacaacaacgattctcccgacgaaccggacgaattgcgattatgctgcgcgtcgtcgtcgtcgttgttgttctcctcttcgctgctcgtttcgtctaaacctatattgtatttgttcaagtaatgtttggtgcttgcggaggattcgtggttcattaatttggccactttttgtaaaggcacgccgctattgtataggttactgctcaaataatgtcttatcatgttgctgcgcggccgttccatctcgacgcccgactcttcaaggagtcgcctgaaatctttgaagggcgtcgaggtgtttttagatatttgcaaaatggtcgggtttcgtgaataaatctcgcgtgccaattccaacggtttcattttgatgttgttgagtgtgttattacgactgcgttttcgctttaaattaatcgtgtcgctgtgcagttttcctcttttaattagcacgttgagatcgtccacgctgagttggcgcgcttcgttgattcgcatacccgtccctaacatgatgcaaaacactatcgcgcccctaattagacctcggtcgtgaacataatcgctgttgagcattttaattttatcattaataaaatttaatatagtatctattacgtttttaagcattaaattcttttccttttccctgatatttttgagctccttgtcgcgcggcagcataaccatgcggggaattttgtattcgggcaagttcatcatgttggtgtaaaagtttatagtcaactgtagtgtttctttggtgaccgagcgaagttcgagcatgcgcctgcacagttcttggggatcaatgagaagtgtttggttttctatcgagtcaaactccttgtccaacgagtacgacatgtcttccaggtgaacatcgtctaccgagcagtacacaattttaatgaatcgagacttgtaactttttaaagtggtgggcgcaaacggtttcgggaacatgtacttgctccacagactgttgtttttcacctcgtcgggcgtgcatcgttgtcgatcggtggccaaatcgaacacggactcgaaccggggagcggattgaatttttattttccaagaattaaaattgttttcgttgcgaacattaaaaccgttcattgtggattaatcaaatttattaaaaacaaaaggagaatcggtgtcaatactatccgaatattgttgttgttctcttaatattacgaaataatatattacatacagcagtaagaataaagctataaaagcgactacactaattaaaattataattcccgccgacacgttgctcgtcgtgttgtcatagcccaccatgtcgtttattggcattttgtgaacgggctcgctaaattgttgcggttcgctggcagtatcgtcgttgagcgccaatttcaacgggatgtattccaccttttcgtggttgcccaatcgatagtagggcacgtccaaattcatgtttacaacttatttgctaacaggaatttatgcaacaaaagtggtttagctttgatgagacgcaatttgaaatacttgctgcatttacgcttaagattgtattccatgcgggcggcggtcttgtagtcgtacgcgctcgcgctgtgatacacgagccgtaaattggttgcgttgcgcaaacacttggcgccttgtttgttcgaatgctgttttatgcgtctgttaagattgctcgtgatgcccgtgtacaattttccattgtcttgtcgcagaatgtacacgcaccacaccttgttggtgtacagagtcgtcgccatgattatgcagtgcgcccttttgtgttcggccgcgtggcgttaggcgcagccgcggcaataatcgcgttggcgtccttgttgtaatttatttgttgaaaaataaaacgtcttagagtttcgttttggaacgccaattcggtcaagctctcctggcaagcgcttttggtcaaatgagcggccggcgaattgaccgcgttggcggccgacgttaagaaggtggcgttctggaacatgctgggctgcttgccggctcgcgtcgccagctcggccatgtaattgaatatgttggccgacgcagatagcggcgccaaaaacgcaacgttctcttttaaactcatgactcgcgccctgtttttttcgttcagcacgtagtggtagtaatcgccgccgccggcaaacagatcgtcaatcacggcgttgatcagatcgttgatcatgttgatgtgcggaaagcgacgcgactcgactgcgctctgtatgtttggcggcagagtggcgtgcttgagcaacagagtcatgtaattgttggccagctgctgattgaacggtaacggaatgggaatgttgcacgtcaccgcttccgccaccatgtactggacggccagactgagttgtttggcggcctcggccaaagcgtctttgcccaacatatcagcgccaccgttgtaaaacttttgcgcgtacgccggcagcgaatttagcacaaacgatggctgaaatatatttgaatcgctcgacagggactcggccgcgttgctctgtcccaactctttttgcaaccgaatcaggtggcgtatcatggtttcctccgattcaaaccgctttaccacgtttacgctgattgggttcgtgtcgatgcacatgtcacgaatagtgtttataaaaagaatcatgagaggactaagttctgacatgtcattgcacctgtaatatctaataatcttttgaacaaaatctacacatttgttgtaccaaatagattcgccggcgtcgagcgtcggttctttgctcttgttgtacggtgcgatcgctaccgagtttgtgctgttgctgcggctcgtgtaatccatcctgttgtcgcgcgtggcgacggtcgtaggcaccgtcgccggcggcacgtacccgggcgcgttgtaagtttgcgcgctggtgaatatggccgttgccggattagagggatacctcagcggcggaggggtgttgtaataaaaattgccacgttcatctgtcatactttttatttgtactcttatgattacaaaactcaatatacggattacttataatatagttgttgtgacaaaaaagcgataataaaattaacaaaattatcaacaagttaatcatggaaaatttttcaacgttgaataacaacaacaaaatggcgcaggtcaacagcaccgtttgaaaactgacgcgccgacacaaaatgctttcgcaatttctaaaagccacattaaacgaattttcacctttgatataatcacgcagttcttttttacaacattcgtcgcacaaaattaacacctttataatgagaccgtcggtgtgtatcgtttgaaatgtccgcggttgactgcctggatgaaattcaaacgagtacccagtggacacgtgtatctgtgcaaaataatgggctaatatcgaggcgcccgtttttttaacctttacttttgatattttaataacattaatgttgttatttgcgtaatcagagtttttattgtggtgatcatcgtacaaataatgaagcaacagttcactatcgtatttaatcttgttcagcgttgtcaagtttttgtttcttaggcgttggagcgtctccgtcgtcgatattttcttcgaaatcgagtccaacaacgtcggcgtttccttcttgctcatcgatagcggcggcggaggcggcgtctccgtcgtcgtcattctcggtttctacagtgcgtttgggcgacgacgtgtgtacagcagcgtccgtcttactattatcggaccgccaaatttttgtttgaaataacatttggcccttgttcaactttatttcggcgcagttaaacattattgcattaagatcatattcgccgttttgcaccaaattgcacaaaataccatagttgccgcacgacactgtagaataggcgtttttgtacaacaatctaagttgcggcgagctagccaccttgataatatgggcgccaacgccccgtttttttaagtaatattcgtcttcaattataaaatctagtacgttttcatcttcactgttgatttgggcgttcacgatgatgtctggcgtaatgttgctcatgcttgccatttttcttataatagcgtttactttaatgtatttggcaatttattttgaatttgacgaaacgactttcaccaagcggctccaagtgatgactgaatatgtgaagcgcaccaacgcagacgaacccacacccgacgtaataggctacgtgtcggatattatgcaaaacacttatattgtaacgtggttcaacaccgtcgacctttccacctatcacgaaagcgtgcacgatgaccggattgaaatttttgatttcttaaatcaaaaattccaacctgttgatcgaatcgtacacgatcgcgttagagcaaatgatgaaaatcccaacgagtttattttgagcggcgacaaggccgacgtgaccatgaaatgccccgcatattttaactttgattacgcacaactaaaatgtgttcccgtgccgccgtgcgacaacaagtctgccggtctttatcccatggacgagcgtttgctggacacgttggtgttgaaccaacacttggacaaagattattctaccaacgcgcacttgtatcatcccacgttctatcttaggtgttttgcaaacggaacgcacgcagtcgaagaatgtccagataattacacgtttgacgcggaaaccggccagtgtaaagttaacgaattgtgtgaaaacaggccagacggctatatactatcatactttccctccaatttgctcgtcaaccagtttatgcagtgcgtaaatgggcgccacgtggtgggcgaatgccccgcgaataaaatatttgatcgcaacttaatgtcgtgcgtggaagcgcatccgtgcgcgtttaacggcgccggacacacgtacataacggccgatatcggcgacacgcaatatttcaaatgtttgaataataacgagtcacaactgataacgtgcatcaaccggatcagaaactctgacaaccagtacgagtgttccggcgactccagatgcatagatttacccaacggtacgggccaacatgtattcaaacacgttgacgacgatatttcgtacaacagtggccaattggtgtgcgataattttgaagttatttccgacatcgaatgtgatcaatcaaacgtgtttgaaaacgcgttgtttatggacaaatttagattaaacatgcaattcccaactgaggtgtttgacggcaccgcgtgcgtgccagccaccgcggacaatgtcaactttttacgttccacgtttgccattgaaaatattccaaaccattatggcatcgacatgcaaacctccatgttgggcacgaccgaaatggttaaacagttggtttccaaagatttgtcgttaaacaacgacgccatctttgctcaatggcttttgtatgcgagagacaaagacgccatcgggcttaacccgttcaccggcgagcctatcgactgttttggagacaacttgtacgatgtgttcgacgctagacgcgcaaacatttgtaacgattcgggaacgagcgttttaaaaacgctcaattttagcgatggcgagtttttaaacgtattgagcagcacgctgaccggaaaagatgaggattatcgccaattttgtgctatatcctacgaaaacggccaaaaaatcgtagaaaacgaacattttcagcgacgtatattgacaaatatactacagtcggacgtttgtgccgacctatatactacactttaccaaaaatatactacactaaactctaaatatactacaactccacttcaatataaccacactctcgtaaaacggcccaaaaatatcgaaatatatggggcaaatacacgtttaaaaaacgctacgattctaaaaaacgctgcaactattccgcccgtgtttaatccctttgaaaaccagccaaataacaggcaaaacaattctattctacccctgtttaacccttttcaaacgaccgacgccgtatggtacagcgaaccaggtggcgacgacgaccattgggtagtggcgccgccaaccgcaccacctccaccgcccgagccagaaccagagccagaacccgagccagagccagaaccggagccagaacccgagccagagttaccgtcaccgctaatattagacaacaaagatttattttattcatgccactactcggttccgtttttcaagctaaccagttgtcatgcggaaaatgacgtcattattgatgctttaaacgagttacgcaacaacgttaaagtggacgctgattgcgaattggccaaagacctatcgcacgttttgaacgcgtacgcttatgtgggcaatgggattggttgtagatccgcgtacgacggagatgcgatagtggtaaaaaaagaagccgtgcctagtcacgtgtacgccaacctgaacacgcaatccaacgacggcgtcaaatacaatcgttggttgcacgttaaaaacggccaatacatggcgtgtcccgaagaattgtacgataacaacgaatttaaatgtaacatagaatcggataaattatactatttggataatttacaagaagattccattgtataaacattttatgtcgaaaacaaatgacatcattccggatcatgatttacgcgtagaattctacttgtaaagcaagttaaaataagccgtgtgcaaaaatgacatcagacaaatgacatcatctacctatcatgatcatgttaataatcatgttttaaaatgacatcagcttatgactaataattgatcgtgcgttacaagtagaattctactcgtaaagcgagtttagtttgaaaaacaaatgagtcatcactaaacatgttaacaatcgtgtataaaagatgacatcagcttaatgatgacatcatccaccgatcgtgcgttacaagtagaattctactcgtaaagcgagtttagttttgaaaaacaaatgacatcattttacagatgacatcatctcttgattatgttttacaagtagaattctactcgtaaagcgagtttagttttgaaaaacaaatgacatcaccccttgatcatgcgttacaagtagaattctactcgtaaagcgagttgaattttgattacaaatattttgtttatgatagcaagtataaatagccgaacaaagttaaatttctttcatttgcttgtcaccatgtttcgaatataccctaataacacaactgtgcccggtcgtttagtgggtgacattattcaagttcgttataaagatgtatcacatcgctttttgtcaaattatttatctttgatgcctaacgttgcgattgtaaacgaatatggacctaacaaccagttagtaataaaacgcaaaaacaaatcgctgaaaagcttgcaagatttgtgtctggacaaaatagccgtttcgctcaagaaaccttttcgcaagctaaaaacattacatgctgcttgtttgatgcgagacattatattttcgctgggtttaccaagcatttttaattcagctttgctgcaaaggaaggtgccgcagcgcaaagtgggatacgtcatgaactcaaaattggagcggtttgccaattgtactcggggtcatgtcgttgaagaaaaacaattgcagagtgatttgtatatagattatttttgtataatttgtgctttaaatgtttttaaaataaaagaataacaattttacacattgttttattacatagataatgttgtttgtttgacattaaaggttatcatggtgcaatagttaataatgaacaaacaaaatgatatcattatgacattattttcctgttattttacaatataaatttacaccaactgtgcaaagttttatcatttgcttgtgacaacagcgtgtgtaacaacaaaaacatgaagttgttggcagttttaattttattttattcattttttatgaatttgcaagcggcgccgcaccaccatcaaacggataggtgtgtgttgctgggaactcgcattggatggaacgatgacagcagccaagatcccaacgtatattggaaatggtgttaaataaaatgactatattttttattgaaaatttattttatttaaaattccaagtaatccctgcaaacattgaacactgtaggtatttttaaatttgccacatgcgaacaacgcacggcctatcgtcgaacaccgctattacattatatttgcccctgatataatcgttaaacaattttaattttaataaataatctttacaagtatcgtctgaaggcctcataaacaatttatatgatttaatattaaaatatttttcaatttagtctcgagtgggctgtttacaaattacgctcacgataattgcgtcgtggcaatttgccaaatacttgacgaactaataacgtctaagcgggtttcatcctgagcaactctattatcaaaatcataaaacgatctatttgtgggcaaagctactgtaccgtctaaatcacataatacagcgcggggaaattcgtcgccggcaggaacgtaatattcgaaattgtttacgctcagaaactttttatattgctttttaatagtttctggatttaatggaaatctatcggagcgtttataattgcgttcaagagccgtttccaaagaaacgtccaaaaccactacatttcacgaccacaggatgatctcgatcgcgttcaaacgattcgtaattgttgagaactatcaaatcttgtttggaattttgattttaaacttgtcacaaacattttcactccgccgcttgcaagtagacgcgaaacgtgcaacatgattactgtttaataatgcatacaaataccaaacggtttattatatataaagtgcagtgataactttgttatcaacgcgttcgatgccgacatatataaacgcaatgtaacagtttttgctagtgccatcccatacaacattatgaatacaaggggttgtgttaataataataaaatgatatttatgaatgctttgggcttgcagcctcaaagcaaattaaaaattattgcacataaaatactagaaaaatgtaaacgtgacgcgtacacgcgtttcaagggcgtaaaggcgatcaagaatgaactgaaaacatacaatcttacgttgcaacaatacaacgaggcgctcaatcagtgcgctttaaacgatagccgatggcgcgacacaaataattggcatcacgatatcaaggaaggtgtgaaaataaacaagaggcatatatatagagttaattttaattctaaaaccaaagaaattgaagaatattattacattaaagtagaatgttatgtaaacagttaattaatctacatttattgtaacatttgtggtgatagtagcgtttgtgatacatttatatgattgtaatgttgtgtactcgttttgtaataaatttttgtgtttaatcaattcaatatttttatttgataaaaccttattttcgctactcaatttggcgtttttagacgcaagtcttgcgtaatcatcattgagcgattttagtgctttttcagttgtaattcgtttcagttgcaattctttaaaggatctatgcatgttgttgtagtcgcttttaattttgtccaacttttcttgcatagaaacgctcgtttgttgtaatttgtctagatctaattgttgtttaatgttgagctgcgtttgttcggcaatgtctacctgtagcttttttagtatcgcttgtgattcagacagtatggtgtcgtcggcgtttgcgttgttgtcttccgcgtcgtccaacagacttttttcaaacaacacgctggccaaagaggccgcatcaaaattagcgtttattttattccattgtgcgacgctcgtcacgctgcatttaatcacgtccacaacgtttcggtttacgctgtaaacgttgaaatgcaaactttcaaccctgcacaggggacatggtactttttttcgttttctaatcttgcgtatgcacattgagcataattgatgtttgcacgtgtctagttctaatacgggtattatagtcaatctgtctattggttgcagaaaataatttttaatttctgcaaccgaaaaacaaatgttgcattgcaatttgacaaactccatttttaggcggctactcctccacctgcttcgcctgcaacaccaggcgcaggacctgccgctgcgccgccgcccagagtagcgttcggatttgctcttggtataaagtcgtttcgcaaaaagttgttttctgaattgattatttggtatcccaaaaacagcggaacgtacgtcgggtattcttcgtatccgctaagcgttctgtccagctcacgtgtgtcgccttcaaatttcaaaacgtttctaatttgcaaacggttgggttgacttctcataatgtcactgcttcttatcgggttgtacaactcggggccgtcgggcacagacgcgaccagacccgtttcgtcaattatacacgtggcgcaatttctaaacctcaattcctccgtgtcgatttgcaagtactcgggcgctactgcgcgtcgaatcaaattttgcaaaaatccactgtaattgttaaataattgatcgccagcaccgcctcgacgcgcttgggcgttggtcacgtcaaagaaacgcaattcgtcgcgcgacacccgcgaacaaaacgtgttcgggtttgtggtgtccagaatgctttttgtagttgcgtaaacgctgtgtataacgcgttgcgtgttgcttgtgaaaccttcggtatatttcagattgtcgcatatagcgttaactgcgttttcgttgttatatatcaaatgaaagattagctgttcggcttgcatcatactgtttagattaaacacgtcttggtaattggctgcgcttggaattaaaattcgcttgatacctttttctttatttccaactaaatgcctagcgatcgtcattttgaattgattgtcgtcttcgtcgaaaatgggcaaaaccatttttgacattttaaaacgttttatgaggtggttgttgcaaataaaccatccatcgtcatgatacgcgtcgggcgaacacggcgatttgtatgttatgcacgcgtcgaacgacacgatggacgcgaaaatgcagcgattaactctcatttgtcgcggcgccatacccacgggcactagcgccatattgttgccgttataaatatggactacggcgattttgtgattgagaaagaaatctcttattcaataaattttagccaagatttgttgtataaaattttaaattcttatattgttcctaattattcgctagcacaacaatatttcgatttgtacgacgaaaacggctttcgcactcgtatacctattcagagcgcttgcaataacataatatcaagcgtgaaaaagactaattccaaacacaaaaaatttgtttattggcctaaagataccaacgcgttggtgccgttggtgtggagagaaagcaaagaaatcaaactgccttacaagactctttcgcacaacttgagtaaaataattaaagtgtacgtttaccaacacgataaaattgaaatcaaatttgaacatgtatatttttcgaaaagtgacattgatctatttgattccacgatggcgaacaagatatccaaactgctgactttgttggaaaatggggacgcttcagagacgctgcaaaactcgcaagtgggcagcgatgaaattttggctcgcatacgtctcgaatatgaatttaacgacgacgcgcccgacgacgcgcagctaaacgtgatgtgcaacataattgcggacatggaagcgttaaccgacgcgcaaaacatatcaccgttcgtgccgttgaccacgttgattgacaagatggcccctcgaaaatttgaacgggaacaaaaaatagtgtacggcgacgacgcgttcgacaacgcgtccgtaaaaaaatgggcgctcaaattggacggtatgcggggcagaggtctgtttatgcgcaatttttgcattattcaaaccgacgatatgcaattctacaaaaccaaaatggccaatctgtttgcgctaaacaacattgtggcctttcaatgcgaggttatggacaaacaaaagatttacattacagatttgctgcaagtgtttaaatacaaatacaacaatcgaacacagtacgaatgcggcgtgaacgcgtcatacgctatagatccggtgacggccatcgaatgtataaactacatgaacaacaacgtgcaaagcgtcacgttgaccgacacttgccccgcaattgaattgcggtttcagcaattttttgatccaccgctacagcagagcaattacatgaccgtgtccgtggacgggtatgtcgtgctcgacaccgagttgagatacgtcaaatataaatggatgccaacaaccgagttagagtatgacgccgtgaataagtcgtttaacacactcaatgggccattgaacggtctcatgattttaaccgacttgccggagttgctgcacgaaaacatttacgaatgtgtaatcacggacacgacaataaacgtgttgaaacatcgtcgcgaccgaatcgtgccaaattaaagcacgttaagcggatacaacgggcagtccgagctgttaaagtcaatacaaccatcgttaacatacgaatacgcatcgttttcgcgacagttgaggatatacaaaggaatagtgaaataattgcaatgaaatatcctgttacaattccacggcacagcgtatgttgctcgagttctatcagttgcacacaacggcctaagaaaatctgtcaatgcttcgtttgtatctatattagaaggataatacataggttcgcccaaaggattgggtgaaggcggcggcgaaggtgtaggtgtgggaggaataggagaggctggaggtgtaggtgtaggtgtaggtgtgggaggaataggagagggtggaggtgtaggtgtaggtgtgggaggaataggagagggtggaggtgtaggtgtgggaggaataggagagggtgtaggtgtaggaggaataggcgagggtggaggtgtaggtgtaggtgttggaggtataggcgaaggcgaaggtgttggaaaaataggcgaaggcgaaggtggaggtgtaggtgtaggtgttggaggtataggcgaaggtggaggcgaaggtgttggtgtcggaggtaaaggcgatggtggaggtgtaggcgatggtggaagtggcggtacaattggtggatctggatgcaattcctgagtgtcgtctaatatttttaaagttaaataaattattattaataaatttaatattattaatattataacaatgtaccacatgttgcttaaatataaaaatcaaacaaagattgttgtattattgcaaatttaacaattttttgtattctccccatgtcatgcgttcgtaatgagcgggtgtctttttatttctttgtatccacttgtaatcgttaatgtggttgtgaaaagtcatgctaacgtaggccattaaatttttcatgagcatattgttcgacacaaccgcaacgtccgcacctgcggtttcctgctggtacgaatcgacaaacgtaatgtctgtcccgtatttttccttgtcgagtgcaatttctattagctcaatatggtaaatgatgaaacctttgacgttcatataatgatcgcggcacatggcgcactgtagtatgaaaaatacgttgtaaaatagcaccttcatcgttttcaactgctgcatgacaaaatctaaactgcttttgtctcgcgtatacaccatatcgtcgatgatgagactgagaaagtgcatggtgtcccatatggtagtaaacgtgtaagtaaaactcttgggctggcacgaacgcaaattgagttctgtggttttgtccataaattctatgcgaaactgttgcaagtccatgtcgggggatgcgttaatggcccattcgatcaactgctgcacctcgtacttttgaatgtctttgtatttcatcaaacacgcaaaatggtataagtaagttgcttgcgaagacaacagtttggtgaggtgcgtcgatttagaggctcgcaaaaggtctatgagacgaaacgaatacaacagatagctgtctttgtaacgagaaaaaagcggcgtcagcggtatcatggcgactagcaaaacgatcgtgctgtacttgtgtcaggcgccggccacagcgtcgttgtacgttagcgcagacacggacgccgacgagcctattatttatttcgaaaatattacagaatgtcttacggacgaccaatgcgacaagtttacttattttgctgaactcaaacaggagcaagccttatttatgaaaaaagtatacaaacacttggtgcttaaaaacgagggtgcttttaacaaacaccacgtattgttcgatgcaatgattatgtataagacatatgtgcatttggtcgacgagtctgcgttcggaagcaacgttatcaactattgcgaacagtttatcacggctatttttgaaatttttacgctcagcagtaaaatcgtcgtggccgtgcccgccaattgggaaaacgataatttaagtgtacttttgaaacatttgcacaacctaaatctcattggaattgaaattgtaaattaaaacaaatcatgtggggaatcgtgttacttatcgttttgctgatactgttttatctttattggacgaatgcattaaatttcaattctttaaccgagtcgtcgcccagtttagggcagagcagcgactcggtggaattagacgagaacaaacaattaaacgtaaagctgaataacggccgggtggccaacttgcgcatcgcacacagcgataataaattgagccaagtgtacattgccgaaaaaccgctatctatagacgacatagtcaaagagggctccaacaaggtgggcactaacagcgtttttctgggcaccgtatacgactatggaatcaaatcaccaaacgcggccagcacatctagtaatgtaaccatgacgcgcggcgccgcaaactttgatattaaggaattcaagtccatgtttatcgtattcaagggtgtgacgcccactaaaactgtagaggacaatggcatgttgcgattcgaagtcgacaacatgattgtgtgtttgatcgaccccaacacggcgccgctgtccgaacgagaggtgcgcgaattgcgcaaatctaactgcactctggtgtacacgagaaacgcggcagctcagcaagttttattggaaaataactttaccgtcattaatgctgaacaaaccgcctatctcaaaaactataaatcatacagagaaatgaattaataaaacaaaaagtctatttatataatatattatttattaacatacaaaatttggtacactagtgttcaaatcgtttctgttcaacgccattgtcatgttataaaacacatttgtagttttattgtaattatttttaaatttatttttaatttgctgtaataaaacttgttcattaaatacaaaagactttgaactacttgcgtttatattctttttataattgtactgaacaaacgaggggtgcaaaaagtttttcaaatgctgcacggcaatacctatcatctcctccattttgtcctctcctattgtaatagtggcactgcgcaccgttttaatgtttagaatgtaaatgagcgcatacagcggactattgttggtgctcaagcacattaggttgtgcttatgcatagggtcgttgctcagcagcgttttgtatactacaaagcccgttttggggtcgcgtctgtacattagtacgtgcgacaaaaacaaacgcaccggcgtcacaagcgactcgtaatacatgctttctatcggaaactgtttagacttgatgtgttcgtacacggagccggcaaacttgacgctgtctacaaacttatggttcgtgtaaacaatcaaaaatctgtcttgtacaccgtcgtcataatcgtccacgtacagcggcttgttgttaacaattaacattttgtagttggcttcatactttagcaacccttggtattttctgctcttggaatcgctcttgctcgaatcggcatgcttcttaaagtacgactcgctgcattgtttcaactcgttgatagtgtacagctgcgagttgagtttgctcacttccttgtcgctcgtttccttgttggactctccgctgtggttgtcatcgtcgaacttgtgcatcaacaccaaatagtccaacagctcaaaaaacgacgacttgcccgaacccggttcgccgggcatgtaaatagccttttttccgtaatctacgggaatggccaaactagcggcgaaatgcatcaacataatcgcgttcgcgtgattaaaattggtgaagcgtttaaagtacaaatagccttcgacaatctttttcaaataattgtacgagtactccttcaagtccactttggacatgatgatgcgcatgtagaatcgagtcagccaagtgggcaaatcgtccgtgctgcgcgccaatatgattttgtcccaccacacattgtacttcttcaagatcattaacgcgtcggcgtggtgcgtgtaaaatttggaaatgttatccgattcttcaaactgaacatcgggttcacgtgcaacatcatcgcgcaattcggttaaaaacaaacgtttatcattaaacttgtacatcaacatgtcgacatattcgattttgtgaattgttcgatacaagtactgaataattttgttgtgttctttggaaaaaaactctccgtgttggttaacaaattcgctgttcgtgcgaatcaacgtggtcgacacgtacgttttgttggtaaaaattagcatccaaatcaattcgctcaattctgcatcgttaccgaacatgtccgccatcaagcagacttttagcgcttttctattgatctttattttcttgtagcatttgcattttggtcgagatcccgataccgttgaccgacacggtttgcattttaggttgtgcaacatgtcggaaaccctgttcttgtttacgtacagagcgagcgtaatcagattttcatcgtccaaattccacaaatcgcgaaacaggttgtttaacgcgactcgcatatcggcttggcatgtgttgcaattgcccatgtagttaactatggccgtgttagtttttagcatttttacatctcggcacattttggcgatgtgataagttctataaatgctgagctcgtcggcgctagtagatagcatgtaattaaacgcgtcttcgggcaaatacttttcgtcggtgggcttcttgaatgtctgcggcaacgtggtgcccaacaaaaatggacagctcgaatgaaagctgttggtgaacacgttgtacacaccgtgcgttgtcaagtacaagtatttccaattgttaaattttatgttgctcaacttgtaacaattgcttttggtcaatttgaataggtcatcctctttctttacaatttgatagtgtttgccgttgaaaaccaaattgactccggtcactacgttttccaattttctaaagaatcctttacacacaatgtcaggcggcaagtttagcgccatcacattctcgtacgtgtacgcccacaattcatcgtgatccaaaatttcgtttttagccgactgagtcagatatatcatgtagtgtatgccaaaataatagcccaacgatacgcacaatttggtatcgtcaaagtcaaaccaatgattgcaggccctattaaacactattttctcttgttttttgtaaggctcacatcgcttcagagcttcattcaaagcttctttgtcgcaggcaaataatgattcacacaaaagttccaaaaacagtttgatgtcggtttctctgtacgagaaattttcgttcttggtcaatatcttccacagtacatagattaaaaaatcaaaatttttaaatttgcttttttcaaagtattgttgtagaaggtttggatcgttggctcgttcgtgggtcgccaaaactttaaccatgttctcgtgaattgctataagccccaaattgatttgcgtttgaatgtagtctgcattttcgctgctcgccgatataatgggtacgatgcgcggttttctggaacgcgtgtcgttcaagtccacatcgtttttgtcaaaattgttgttctcgaacactctgaggcttttgaggttgacgttgacgatatgcttgtacttgggcaccgtgatgcattcctccaaattaatgtcgtccctaatgtaattgaaaaaatttttatccgaattgaccagctcgccattaactttgcacgtggccacagtgccgtcggccattttgagtataaacaagtcttcgtgagaatcgtcaaacttggtttttccatttacaaacagcgtttgcggcggatcgtgattcgtgcgcaggctgagctcgacgttgagaaaacatttggggtcaaacacgaacaaatccacagggcctagttttttgttgtgtatgattggtatcgtgggttcgatgacaattccaaattttatatttaaaaacagctgccatccgttgaaagaaaaagcttgctctttgggccagttgggccaataatagtaatcacccgcttgcacgcatttgttaatgtatccagggtcggtgctcttgaaaaaatcttcaaaattaatatacttttgtatgatgtcatagtgcttcttcaaaatgaaaggttttacaaaaatgcaaaaatcgttactttccaacacccagtcgtggccgtctaatgtttgagctgcgtgtttctctgcaggttcttcggtgtcttcgcaagatgcgcccatgtcgtgtttcgcgcacggaccgttaaagttgtttctaattgtgtttaagaactgttgaaagttgttgacgtactcaaacaatctacgtgttcctgttcgcgtgtttctaatgattaaatgatttgcatcttgcaagttgttaatctcgtacgttttgtcttgaggcacgtttttcaaaaaaaattgtaaaatgttgtcaatcatgttggctatcgtgtttgtacttttcgtgttaatttatttaataatttcgatcaaaaatcaccatccattcttacatagaatagaaacgctaatacaagatttcaacaacacattgttgtttggcgcgtatgtacagatttacgatttaagcacgcccgcccgcaccgaacgattgtttattattgcgcccgaaaatgtggtgttgtataattttaacaaaacgctctattattacttggactcggcgaacgtgttttgtcccaacgagtttagcgtgaccacgttcacgcaatccactattaaaacgatcaacgagacgggaatatatgccaccgcatgcacgccggtcagcagcttgacgctaattgaacattttgcaacattaaaaaataacgtgcccgatcacacgctcgttctcgatgtggtcgaccaacagattcagttttcaatactcgacattatcaattatttgatttacaatggctacgtggatttgttggccgaataacgcgtatatagacgcttttacgttcatcgtagtaatcattttaatacatttgattgaactaaacatacatctgcaatgggtgaaaaagtcactaaattttgcaagataaagaaaacagcgacaatgaatagagtgtatatttttatttaataaaatattgttcgtaatccataatgttttgtattatttcattgtgataatgttcccaatcttgcacgggggtggggcatcgtttgactttgacgtagaaatcgtacgcgtagttattagttggcagatcgtcgacaagtgtgatcgacttgaaaaagtttacatttttatcgctcaaatatttaattacaatttttggcgatttgggtatattgttgtcggatcgatgattgtgaatgtcaaaaacaaatttattttcaatgaaacgcttttttaaattgtaatctacaatagcgttgtgtgaattttgaactaaatcagagcgttcttcttgaacggtggaaccttcgctgataatgatatcaaaatagccttccaaatcgacgtctcgcatcgagtgtgctacatgatctctactgccatacgaccacaagactaaaacgcaacccatctcgtgcaactcctgcaagctgtcatacacaaacggatctcgaatctcaacttgctcctcttcggttatgagagtgctgtccaaatcaaacacgaccacgtgcggaaatccccacgtcaaagattcgcttttgagagagaccactttgtagtgtggcaatagaaaccattctttaagaaacgaatacattggcggtttgttgctaagcacgcacatgtggcccaacactggcgttttgaatgcgcgtttaatattgtgcctgatgtcgcgcatgtcgtcggcgggcgctttgaatatttgcatacagtaattgtaattgttttctataatcttgcacagctgcgggtcgttgcaaaattgaaatattacatattcaaaaaatttatacttttcaaagccaaggtatttgaggtcggcgtactcgcttaaaacgagaacatgtcgtttgatgatggcgtcgttaaggcgcaaacagatccatttgctttgaatcgaggaggccataatgtacaaaaatggaccagttacgccttatttaaactgtttaaagagtttcgcataaacaaaaactactctaaactaatagatttcttaacagaaaattttcccaacaacgtcaaaaacaaaacgttcaacttttcgtctaccggccatctgtttcactcgttgcacgcgtacgtgcccagtgtcagtgatttggtgaaagagcgcaaacaaattcgattgcagacagaatatttggcaaagctgttcaacaacacaataaacgatttcaaactgtacactgagctgtacgagtttatcgaacggaccgaaggcgtcgattgttgttgtccttgccagctattgcacaagagtctactcaacaccaaaaattacgtggaaaacttaaattgcaaactgtttgacataaagccgcccaaatttaaaaaggaaccttttgacaacattctttacaagtattccctaaattacaaaagtttgttgttaaaaaaaaaggaaaaacataccagcactgggtgtacacgcaaaaagaaaatcaaacacaggcaaatattgaatgataaagttatttatttacaaaacagtaataaaaataaactatttgagcttagcgggcttagtttaaaatcttgcagacacgattttgtaacagtcgaaagccaaacgagggcaggcgacgaaatcgcttcgttcattcgctactgtcggctgtgtggaatgtctggttgttaatagtagcgtgttctgtaacttcggcgacctgtcgatgaacggctcctggatcttctgtatgtgcggggtctacccgggcggcgtctgtaacccgagcttctgcgcctgcgtgtcgaaccatatgtggtaccggttgaagaacggcgacggcgacgataaaccatgtttaaattgtgtaatttatgtagctgtaatttttaccttattaatattttttacgctttgcattcgacgactgaactcccaaatatatgtttaactcgtcttggtcgtttgaatttttgttgctgtgtttcctaatattttccatcaccttaaatatgttattgtaatcttcaatgttgaacttgcaattggacacggcatagttttccatagtcgtgtaaaacatggtattggctgcattgtaatacatccgactgagcgggtacggatctatgtgtttgagcagcctgttcaaaaactctgcatcgtcgcaaaacggaatttcggtaccgctgttgatgtattgttgcggctgcaacatttgtatcttttcgccgcgctcgatcaacaattcttcaagagtggtgcgtttgtcgcgctgtaaagccacgttttgtaacagcactattttcgcatatctcataatcggactgttgaaacagcgtgcaaacgacgaccgcataatatcgacggtcgtcaagtcgattgtggtcgaaggcatctccaacagagatcgcacggcgtccaacagcgtgtccgtttgaacctgcgtcatttgcggtctgcacgtgtagtcgtcaaacgtggtttcgagcagtttgaacaacgaatgatacttttccgatcgcagcaaaaatatcatggtcatgaccacgtcgctgattttgtattctgtagaactggtgctgttcaacgaatagtgatggattagtttgcgagcagcatttctgtatcggcgcatgttgatcaactcttcggaaggctgcgcgggcacggcggcgttggctcgcgcaaacaaatttattacgggacgcggcgtaggctgcgcggacgctggcgcggcgacgacgtccgcgtttcccgccgcgtactgagacgctatggcagcgttgttatttaaaattgtgttttgcgatttgcgagccacgtgcatcataaaatctatcaacacgtcggtgttcaactgcacgctttgatgttcgtcgcagagcaaaggaaatagctggggccatatcgccaattgcataggctcgtctatttttaaccgcaatttgtttatttccaaatacaacgcgatagcgctcatcgtgaccgacgacgcacacttactctgtaactatcacttggatcgtgttgtcgtaaacgctccccaaaaagtctaacacgttgaccgtttcgattctattcaacttaattgtggacgcgttggcttgcatcggttccaacagactgcgcgctccgacagattgagtagacaaaatttttaaactttccgtcttattgggcgtaatgtcgttgattaacaacgacgcagccgtttgagaggccgcggtgttgatggtttgcaacatgtcgacggccgccatttgcgtttgcgccgaaggtcttgccggcggcctgttgcggcggtttcttcgtgcttgcgacatgttgtcgtcagtgtccatatcgatatcatttattgaagcaatcatggttgagttcgataagcagagatatttcgttgtccaattgatacttggtaatgatgtgccttataaatgtttcgggcacaatcatttctgtcattagcacgttacaaatatctattttgatcaatttcaatttatgaattaacagattaatgttttcgtccgagtacttgctcatgatgaaacgacaaacgttgcggagttccaactccgctaccggatacgctttgttgggcaaactctctaaatagtgtctcaaataaaagccgatcaatacggtggacgctattttgttaacctttttcattttagtattgcggcccatttctatcatgaagtttttaaacggtagcaacagcctgtctccgttagcaacggtggagcagccgttgcattgcgcgctcaaaatactcaacacgcgctcgtgatcctcttggcgcaatccgacggttgcttttttgcattctttgacaaatggcacgcacatgtcgcgtttcgtgtacaaagaatacgctttgtcgcaaatcaagttatagaaaaattgcacaaatatctgcgtaatcaagttgttttcgttaataatgtcactttcgtttttgtaatcggttcgaagcaacacgtacaacatcagaggcatgccgaacatgggtcttaaaaaaatgtcccaaccattttgcaagcccgcgtcgagggtgctcagcgaggacgccaagtatttgcatttgcactcaaaacattgaattttgtttgcgggcttgcacgactgacacatgatcgcatccacgtcgggtgccggcgtcggattgtaatatttttgcaagtattgcataatggtcctaaagtggggtacctgtttgatgaactcgtcgcgcaaaaatatcgaaaaaatgttttttacattgtgtatgttgtctgtgttgttggcttgattctcaaaactactctttatggaaacaatacatttgttaaattctgtgaaaaaagtaagacctttactgtccacaatcaagctttggttgaaatattttgaaaataaaaaacacaacgaatcgatttcatcttgtaacaattgcgcttcaaaacacacgttttcaaagcggtcgtaaatgttaaaccttaaactgtattgtaatctgtaagcgcacatggtgcattcgatataaccttataatatgaacgattccaattctctattgattacgcgtttggcagcgcaaatactgtccagaaacatgcaaacggtggatgtgattgttgacgacaaaacgctcagtttggaagaaaaaatagacacgttgaccagcatggtgttggctgtaaatagcccgccgcaatcgccgccgcgggtaacatccagcgacctggccgcatcgatcattaaaaataacagcaaaatggtgggcaacgattttgaaatgcgatacaacgtgttgcgtatggccgtcgtttttgttaagcgttatcccaagtattacaacgagacgaccgccggtttagttgccgaaatagaaagtaatctgttgcaatatcaaaattatgtaaaccaaggcaattatcagaacattgagggttacgatagtttattaaataaggcggaagagtgttatgttaaaattgatagactatttaaagagagcattaaaaaaatcatggacgacacggaagcgttcgaaagagaacaggaagcggagagattgagggccgaacaaactgccgcaaacgctcttctggagaggcgagcgcagacgtccgcagacgatgtcgttaatcgtgccgacgccaatattcccacggcatttagcgatccgcttccaggccccagcgcgccgcggtacatgtacgaaagttcagagtcggacacgtacatggaaaccgcccgacgtaccgccgaacattacaccgatcaggacaaagactacaacgcggcgtacactgccgacgagtacaattccctggtcaagacggttcttttgcgtttaatcgaaaaggcgctggccactctaaaaaatcggttgcacataacaactattgatcaattgaaaaagtttagagattatctgaatagcgatgctgatgctggagaatttcaaatatttttaaaccaggaagattgtgtgatactgaaaaatttgtcaaatttagcgtcaaagtttttcaacgttcgttgcgtggccgacacgttagaggtaatgttggaagcgcttcgtaataatattgagttggtgcagcctgaaagcgatgccgtacggcgaatagtcataaaaatgacgcaagaaattaaagattcgagcacgccgttgtacaacattgccatgtacaaaagcgattatgacgccataaaaaacaaaaacattaaaactttgttcgacttgtacaacgacaggctgccaatcaatttcttggacacgtccgcaaccagtccagttcgcaaaatttccggcaagagatctgcggaagacgacttgttgccgactcgcagcagcaaacgtgccaatagacccgaaattaatgtaatatcgtcagaagacgagcaggaagacgatgacgttgaagatgtcgactacgaaaaagaaagtaaacgcagaaaattagaagacgaagattttctcaaattaaaagcattagaatttagcaaagacattgtcaacgaaaagcttcaaaaaattattgtggtcaccgacggtatgaaacggctgtacgaatactgcaactgcaaaaattctttagagactttaccgagcgccgctaactatggcagcttgctcaaaaggctaaacctgtacaatctcgatcatatcgaaatgaatgtaaatttttacgagttgctgtttccattgacactgtacaatgacaatgataacagtgacaaaacgctttctcatcaattggtaaattacatatttttggccagtaactattttcaaaactgcgctaaaaacttcaactatatgcgcgaaacttttaacgtgtttggcccgtttaaacaaatcgactttatggtcatgtttgttataaaatttaactttttatgcgacatgcgtaattttgccaaattaatcgacgagctggtgcccaacaaacagcccaacatgagaattcacagcgtgttggtcatgcgggataaaattgttaaactagcttttagtaatttacaatttcaaaccttttcaaagaaagacaagtcgcgcaacacaaaacatttgcaaagactaataatgttgatgaacgcaaactacaatgttatataataaaaaattataaaatatttttaatttttatttatattcagtacatttacacatattaacatattgtttatacaaattcttataatcattatgatttaaattgaattgttgtctaaacaaattaaacactttattaaacaataacttttcgttgtcattttttacttcgcacatgttataacaaaaaattaaaattttcatcatgtctgatttgtctatggcgtcacagttgcttttaatgtaatcgcaagttaaccactcaaaaggacccttttctatttttaatttgtttaaatctttataatcagacttcagtttgtaaattagatttccacatcgaataataaatccttccagcgggctttggggaaacattaaagacttgaaatttaacctttctacaaaatcgttgtacaaatatttgtgacacggaatagtattaaaccccgcgttagtcaacaactcttgcgcctccacaaagggcacaaactccccgccgtataattgaatttcgtaagcgtagtattttaaactctctttctggtccacgtagttaatcacgttaatgggtgtcgtttttgcgtcgtctttccaacccattaattcgccgtagacaataaaaccgtcattgaaccgcgtctgaagcgatcgcatgcacgtttctaaatcttttcgaatgcggtaataattcataaaattgccgtccggtctgtaagtgtttcttgacccatacgtaattttattttggttgcaaatgattctgaaattacaaccgtccaacttttcttgaacaataatctctttgtcggccagcgtgccttttttaccttgatctagatgcgacacagatggataaatttgatacacaattttattctcatcttcgggcattacgggtccgcgttcatttaacgcgtacatgacaatgttgtggcgaatgtcggtgcgctccggcggttctggcacgtggtgcagtctgtcctgcaattgttgcttccattgttgaaaatattcggtccattcttgttgatactcgcagcgttgcatgagttttacgtacagttttaaaagtttgacattctttacaaataacgttagagtttcgtcgattttgtattctccattatttttgtttaaatccaatacatttaaatcgttcactaccagttgattgtttttatccatcgtaatttttatttcatcgcccacgttgaacagcatgtttaaaattttggtggatttcggcgcacgtttataatctaaataatattcaacgtacacgtaattgaacatgagctgcaacaatcctttggcattgttcaaaattttgtatctcatcaaagtataaataattttcaccatcgacaccgtcatcaacttggttacaaactcgtacaattgcgagttttcaataccatatttgtctttaaaatcttcacgtttactgaacatgcccaattcgggagattttccagtcaaaatgccaattaatcccgtgtacaagtcaacgtatttgacatcgttgcccgattcatcttttgcatgtcgatttttcaaaagctctttattgtcgataaatttttcaaaggtctctcgatcacatttagtgtaaatatggtagtcagtgtcgctgctttcgaccgcgtatcccttggcatggctgcccgtatcaatgcaaatgtacaccatgttagcaatgctgcttactgtgcttgtatcaagccttatatacctcaaaatatttcatatttttgcatcaccgtaaaatatacatgcatataattgtgtacaaaatatgactcatcaatcaatcgtgcgttacgcgtagaattctactcgtaaagcgagttcggttatgagccgtgtgcaaaacatgacatcataactaatcatgtttataatcatgtgcaaaatatgacatcatccgacgattgtgttttacaagtaaaattctactcgtaaagcgagtttaaaaattttgtggcgtcaatgaaacaacgtgtaatattttttacaatatttaagtgaaacattatgacttccaacaattttgtggatgtggatacgtttgcaagacaattgattacagataaatgtagtgctctaatcaaaagtgcggatctgttgccggcaaacattttagagattgtagaaaaggccagagacaagtattttgaggagccaactcaaaaaaactatgagtacattaaaaaattatttttacgaacaaaatacatggacgattcgatagattataaagattttaacagacgcatcctattgatagtttttaaattcgctttaaacaagagcaccaactactttccatcgtacaaagagatcatagaggtggccattaaacgtttaaacaaaattaaccccgatttaaagagttctccgcgcgcaatgcttcagcattacaatgaatgtttggaaaatctagacaatccagttacggacgaacatcatttgttaacatttggaaaagaagttgctacaaaaatatttatcgaagcgtttgaatacagttacaccaacactaatgccatcagcatggacaaaacagatgaatttgattttattaaaccggcattgaaacctttgccagatgcaagaccgccatcgcttttggctaacgtgatgaacgaacgtaaaagaaaattacaaaacaccaactcaacggcaaaatgtttgctaccagcaccaccgccacaattgcgtaaacttgaaaaaaagaatcatttattgcctttgttttctttgtaattatattgttgcatttctatttctaatatcatagttttctaataaagtagtttcatatttttgtttttgtacagtaattgtttcttggtttaacaagattacaaccaataacataaagaataacacaatcataacaaaaattaaaaagccgcatactactagaacaaattctttaattagcgatcggtttctatttacaaattggccgagctgatcgccttcagtcggcgagttgtgggcttggatgatgtcgacgatattgttgccggcgcgaccgcccgtcgctctcgatataatgtcggccgccgtcggtttcatgatgtgcttaactacaaataatagttgtacttgacgggcgtcaccgtgatgccgctgctaaaacctccgtccgttaagacgcgttgcgttacaaaattaatgtttgtccgattagcgtagtcggaataatcaaacgtgttgggcggactaaaatcgggcatgttgatgggcacaatgccgctggagctgatagcaatgctgtcgttcttgcaaaacagccgaatttttttgtagggctctgctttattcggcgcagacgacaccatctggtcaaagttgttcaattttatgattacgttgggtaccaattgataggggaaaattattttctggaacattttgacaaagtccacaaccgtttggctatagtcgggaatgcccagcaaagactgcgcctgtttaatgtatttgagactggagcggtttaccgtagcgcaattggatggcacgtcgcccttcataagccggcgcgttctctcccaatttaatttgttgtacaaattatcaatctcctcgtgcggcagattgattacatagcgcgcgggctgtttgcgatattgaaagatgcaaaaaatgcgtttcaacgacaatatctttaccatggtggacgtttccagattgaaacataacaaaaagtcattgctttccaccaattctttaaaatgagacagcggaatttcacaagcgatcggtcgcaaattgctttttattggaggcggaacgctttgaccgttgcggttttttagtaacgcgctgcacgcagattgcatatccgtttcgggatacgtaaactcgatgggacatttggggttttcatggtggacgatcatagtgttgcaataaaacaagttgttggtcaggagcacgctaaaaacacgcgtttcgcccgcaccgatttcggtgatgggcaccaacgggttccagtagactatggtggcggacgctgttttttttggcgatcgactgtctatgttaacatcatgctcgtgcctgtacactagcacagaattgaattttggaaattgttttttgtcaatgtacaaccggtcgtcgtctgtgggcacgtacacgatcaagttttcgattaatttgttgcctacgtcgctttgcggttccaccaaattgtgagggaacgcaaaaaagcgatcgctaatacaaacttgaatctgaaacgggcactccatcgcgatgtatatgtcttacttcattagactttagattattttaatttgtgaactcgtaccgtattcaatagggtgtcgggcacgtaattgtaatggtaaaacagatcctgttgaacacgtgcgttgttcactatgattgaaatgcaaaaatacatcaagtacataaacactatgattagaaaggtagcagacaaaaaatatttcatctttaaatcttatgctagttgaataaaatacatagtacttttatacgtttatttatatttgttttctttgttataaccgtaattgtaaaacttgtgatcgtgctcgccaggcataatttctttgcacatcagcttgcgaatatatgtgacatcttcgtaaaccgatttcttgatgttaccatcgtgaagcgttgtcggcttgagaggtttgcggtcgttgttgtaaaaattttgcaccgaataattatccatagtgcagcacaggcaatgtcactgatgcatatgctttaatttttaattgcattcagttattatatgatttaataaacgtacacaatagcacgtttatcgtttaaagataactttcaatatataaaagcgtttgaattgcgagaccgtcaacataacatttatcaacgcgatgaccaaacgacaatttgctttgctgtttgtgtggcaccacgacaaccaatttgtgtgcaacacggacgaatacccgttttggcacaacattgaataccatgcacggcgctataaatgcatcgttttgtactgtgtggaaaacgacggatcgctacaactgcccgtttgcaaaaacataaatctcataaattataaaaaagcgtatcctcatttttatggaaactgtgttgacagcatagtgaaacgtgctggcaaaattgattatatgaaagtaactgcaatgttaaacccccacctgttggacgtcgcgtacaattatttgctgttgatggacatggattgtgtggtgcaaagcgtgcaatggaaacaattgtcaaccgacacgtattgttttgagccgttttacgactctcaaattaaatggttgtacgcgcccaaaagcgggcaaagttttgatagttatcttgaaaactatgcaactctaattcgagtcaaacaagtgcagcaacatcgaaaagaattaatactgcattgtgtaaattttcttacaatgaaagcaaatgacaattttatggtgttcaaaaattatattaacatgattataaaagtgtatttgcaattttacaattacagatttcccatcaattttgaggacaacacgatgaaaccttgtgtaaatttaacttttagacgtggtggcagttggaaaactcaactgcaacccgtatgcaattatgtttacaaaagtaaaaatatgccaaaatttattaaataaaacaaattaatttaaacaagcgtttttattgacaatacgcacatttgatattatttataatcaagaaatgatgtcatttgtttttcaaaactaaactcgctttacgagtagaattctacttgtaaaacacaatcaagaaatgatgtcatttttgtacgtgattataaacatgtttaaacatagtacattgaacttaatttttgcaagttgataaacatgattaatgtgactcatttgtttgtgcaagttgataaacgtgattaatatatgactcatatgtttgtgtaaaaatgatgtcatcgtacaaactcgctttacgagtagaattctacttgtaacgcatgatcaaggaatgatgtcatttgtttttcaaaaccgaactcgctttacgagtagaattctacttgtaaaacacaatcgagggatgatgtcattttaaaaatgatgtcatcgtacaaacttgctttacgagtacaattctacgtgtaaaacacgatcacagcacttcgtagttgtatcgaaaattgttcaatggctctttgttaatgtcgtaattgattaatatgtcgtacaatttggcggcgttgtgtttgcacacgaccgtttttagttcttgaaacattttttcgtgtatgtttagcatgttgtatttcagagtgcgatgtgtaatgctggtgacgagcatcaaaatgataaaatctaaagcggctaatttgtaatcccgttcatacgctctgtaatcgccaacgactctgtggccagatctttttagattctgacaggcgttatggtacgaattgataatatttactatagtttctcttgttatcggtttgtcgattaaactgttaacaaacatcacgttgcccaagcgcgacggtttagacaccgacttgttttttgtctgttcaaatttgtacaaattaaaaacgctcatagactggtcgtcaggcagtgtgtcgttatacaaacaaaacggtagagcgtttaattcgacaaacgacgagcacattaaagtttgttggctgttaacgtcctggggatgtaaactgttattcataacgtaacacacttcaatgtcggaatgcttgttttcaaatttgtccttgtctacaatttcaatggtgattgagcgaggtttgagtttattttgtaaattcatttggatattttcaatatggtataccaccgacacgttgtgagccagggatccttgattggttttaatcatactcaaaatattcatgatatggttgaaaaaagagtctgtcaaaacgtttgtgtcgttgttaaatatcgctttccaaggtttactgttgcgtgactcaacgacggccgtgtaacataacaagcgcgccagttgcatgtgcgacaacttaatgttatcaatgtcggtgatgtttggcaccagattttcattgccgtcttccagtagcgtgctcagttcggtcgagtagttattcaacgatcgattgtgcgattcaaacaagtttactatcgcaggttgtacatagttttttatgtcgtcaaattgaattatatcgatcttgtccttgttctccagcataaacgacaaattttttaggtcgaatttaatatttggcgcgttttcgttggactttttgtaatttaacaacatcgccaacagtttgtgtaactcgccgttagcttgatctttgctaaacagtttattggtagcgtaattcacgttgtcgttcaaaaacagcaactcgttgatgatcattttttgtaaaagcgcgtacttgctcatgttgacagaatctcttacatttcagttgtaaacgcgtctgtacaaattggccatgcgattcggaatgcacacggggatcgtgcgagccagtgccgtttggcgaaatagcattttttcatagccgctcgaacattcgcacgcgtccggcgaaaattgcaccgtgttcaaattcatactcaaccggccatcgttgcatagataaggcctcggtgttcccgtatcgtccaccaagtctctgtacgtgctcacgcatgtttgagacacgacaaaatctccgcctgcggagaaaacgtgaaccaagcctagtgcgggatcgcattctatcaagtccggagcctgcgcgtttaccaaagcgtcggaggcgttgcaaaagccatcctggcaggtcaactcgtttgcagcgctggagatcacgcagttgtctctacactgctgatccgtcacgcacggtaaccggttcaatgaacagtctacgcctcgattgcgctgaaacgtaaaatttaacggcggcgcttccaactcgttaatgtgcatgtatgcatcttgcaaaataaatttttgaacaaatttaaacgtgtacatgtacacgattagtataattaccagtagaataagtatttgccaaaagttcaacatgatcgtcttaactgagtgtgaaaagcgtggtgtgacgcacgaaatgactggttgcgcaaaaaataaaccggggtctatataactcggcgtcgaccgcgttcatttttaccgtcatgcatctgacggctaatgtattgctcgttcctaacgcgctcaaaaagcgggacgtgaaatacatttataatacctatttgaaaaattacagtgtaattgaaggtgtgatgtgttgcaatggcgattgtttggccgtggtggtgttggaccgaaatcagctgcaaaacacggacatggaagtgttggagagtttagaatacactagtgacaacattgaactgttatgcgaaaaaatatgtgtgatagttgataattacgacaagtattaccaaaaaaattgtgtataaataaaataccaaattttattatatcattttgttttatttaataattaaagaatacaacgccacatctattcctagtacaacaaataatttgattattatttttgagtgcacattaaaaaataacaaacagtgtaaaaatactacagaataatacaatacataaatattatagtaaatagctgcaattttgatagcgtaatttatactttgatatttttcaacgtacaacgttaaatgttgatacgcattattcacaaataacaaaatttttctaatatgccatttgtccgcaattgtttttgcgatatcaaagcctttttcaaacaattgaaaaattgcaaacaaaaccacgtacatgacgttatacatagtgttaaagtttttacataacaattctataatgaagaaaattgctaaacacggcatgagcgcgcacataatcgcgttggccgcaaatatctcgtacgtacaaaaatactcggacattctccaataagtaaaatgcattttgctattatactgttgtttcttctagtgattattgcaatagtgtacacgtatgtagacttgatagatgtgcaccatgaagaggtgcgttatcctattacggtttttgacaacacacgcgcgccgctcatcaaaccgccgtccgaaatagtaatcgaaggcaatgcacacgaatgtcacaaaactttgacgccgtgcttcacacacggcgattgcgatctgtgccgcgaaggattagccaactgccagttgtttgacgaagatacaatagtcaagatgcgtggcgatgacggccaagaacacgagacgcttattcgagcgggagaagcgtactgcttggctttggatcgagaacgcgcccgatcgtgtaaccccaacacgggtgtgtggttgttggccgaaactgaaactggtttcgctcttttgtgcaactgcttacggcccggacttgttacgcagctcaacatgtacgaagactgcaacgtgcccgtgggctgcgcgcctcacggccgtatcgacaatatcaacagcgcttcgatccggtgcgtgtgcgacgacgggtacgtgagcgactataacgccgacaccgaaactccgtattgccgtccgcgcaccgtgcgcgacgtaatgtacgacgagagtttctttccgcgggcgccatgcgcagacggccaagttcgtctggatcatccggcgctcaatgatttttaccgcagacactttagactcgaagacatttgcgtgatcgacccttgctcggtggacccgattagcgggcaacgcacatcgggacgcttatttcaccaaccaaccgtaaatggtgtgggaatcaacggatgcaattgtccggccgatgacgggttactgcccgtgtttaatcgacacaccgccgacacgggcatggttagacaaagtgaccgcaccgtcgcaaacgcttgcttgcagccgtttaacgtgcacatgttatcgttgcgtcatgtggattacaaatttttctgggggcgcagcgaccacaccgagtttgccgacgcggacatggtgtttcaagcgaatgtcaaccaactcagtcacgaacggtatcgagcgattttgtacccgttgctcgagtcgcacccggacgtaacagaaatcgtaacagtcaacatgggtgtcatgaaaatttccgtgtcatacgataccacattgaaaaatatactattaccatcttctgtttttaggctatttagatttaaagaaagtggcactactcagccggtatgcttctttccaggcgtaggacggtgcataactgtcaattccgattcgtgcatcaggcgacacgctggtgctcaagtgtggaccgcagaaacgttcaccaactcgtggtgtgtactgagtcgtgaaggtacgcatataaaagtttggagtcgcgcgtcacgatatccacgcggagacgcgcctgcagcgttaagattgcgcggcttctttctgaacaacgatcgcgaacgaaacacaataagagcggttactacaggcgacatgacccaagggcaacaaatagacgcattaacccaaatacttgaaacttaccccaactactctgtataacaacatgagcattttaaaagttgtagaagcgtgcgatttggcacacacttttttgaaattgggttatttatttagggccaagacttgtttggatatcgctttagataatttggaactattgcgtcgaaaaactaacataaaagaagtggcagtcatgctaaacaagaaaactacagagtgtttgcaattgaaacgaaaaatagataaaaaaattgcacaacgtgttttaataaaaatttacactatcaaatgatgacatcataacgggttcaatattctgtgtgcaaaaataaatgacatcatatctcaaacttgttttacgcgtaaaattctactggtaaaacaagtttgagatatgatgtcatcatcacaaataatagtatgtaataaaataaacatatttgtgtgtaaatataatttattacaaataaattttacattgaatcaatctgtcttcgtgtttgttgtaaggtcttcgaatcttgtgtttcagcccctcgggatggtcaaaatgcgccgtagtaattgttaatggatctttcaatgattttttgcccatggcgagtgtgacaaacgcggccacaacaaacagcaggataatcagtttcatggtgttctatattcgacaatatatgggtcgcttctaaatcaccttgtccccaaaagcctcttttatagttttttagaacacgttgtgtattccaacagtaattgttccatctctttcaacagccattcagcatccggtcgttgactgtaatcatgctgaattaatttacaaacaatttcggtcaatttaggatggccttgggataaacttgccggcatttgttgtacattgtttctaaagttagttagcgtagtttcgcgctccaaagcagtcttgaagggcattatcaattcgaataaaacaatacccaaactatacatgtcatttttgggggtgtacactttttgaatttgttctggtgcagcgtacaaagttatattttgagggttgtttttgataaacgttttgtatagactgccaaacatgccgcccacatacaaatcaaagtcgggcccagtcatgaaaatatcttcgggattaatattgtggtgcacgatatttacggaatgaatcgctttcacggcgctcaccaaatcaacaaacttgctaatataaaagccaaaatccgccggaactttaatgttggtttttgcaaaagtttgcaaattgcgttgtttcaaatagtcgctcaacatgtactcgtttagaggcgacgcaaaatatatgcggtgctgccgcggattcaaataaaccaatagttcgggtttcatggtatacagttaagtgttaacgcgtcactaaattcagacacgagcgcacgccctatatacatacaatttatcgcacaagatgcttaacgcgatctgtttataaactaaaacgcactgcaataaattttagcaagcatttgtatttaatcaatcgaaccgtgcactgatataagaattaaaaatgggtttgtttgcgtgttgcacaaaatacacaaggctgtcgaccgacacaaaaatgaagtttccctatgttgcgttgtcgtacatcaacgtgacgctgtgcacctacaccgccatgttggtgggatacatggtaacattcaatgactccagtgaattgaaatatttacaatactggttgctgttgtcgtttttgatgtccgtggtgctaaacgctccgactctgtggacgatgctcaaaaccacagaagcccatgaagtaatttacgaaatgaagctgtttcacgccatgtactttagtaacgtgctgttgaattatgtggtgtttttggacaatcaaatgggtacaaattttgtttttgttaacaatttaattcactgttgtgtactttttatgatatttgttgaattgcttatcctgttgggccacacaatgggcacgtacacggattatcaatatgtcaaatcgtgttatatggttatattgtttgtttcagttatgagtgttactattgttatgggtttagagtgtttgaaaacgaaactaattgataacagtttgatgtttaacgcgtttgtgtgcgctttgtacattgtgattgcaataatgtggtctttaaaaaataatttgactaattttcacgtttcaaatttacaaaatattcaagttgttccgttttcatacaacgatccgccgccaccgttctctaacattgtaatagatgacataaaaaataaaaagtaatttataaaaatgttttttattctttcacaattctgtaaattctaaacaaaaaatataaatacaaacttattatgttgtcgtctaaatgaacatcaatttgtaaatctggacacctattcaaatcattgatattacagtctactatacaacaattaaaattaaccaaattatctttacaacaattaaagcaattaaaacaatttaaataatcttcattgtcgtcgtataagtttatttgcactgtagacggtgttacacagcgatccattcgacgttcgtgttcgatcaactttctcgccaacttgtaccataaaaattgtttggacaaaaagttttccaacgatggtaacggccaattcaacgtgacgatgcgcacgtcctcgggtatgcatttgttaaaaaacgcacagctcgctttaccaaacgaaagcaaaggtactaaatatggcgctattggctgatttgttattccaagataattacaaataaactgatccgtagtggggtgataactggcaggtgtcagctttaaataatcttcaacgttgttgtcgcgcaaaagtctgcattttacacgcgttgttaatcccacgacttttgcatgtaaaatcggatccaaatactgcagaatcgtgtctataatttctaatggtaaacgtatgcgttttgctcgtgagcgctttgtaacgctcgacatcctaataacaactaacacaaaactaaaatgatactcaatatattgcttttacagttcatctttaggtttaaactgtgcgttcatcgcgttgagcaagtcgccgttatcggcatcaatctcccaagcaaacaggccgcccaatttatttcggtcgacatatttaacttttcctaacacagagtcgacgctgtcaaacgaaatcaaatcacctttacttttatcgaaaacgtacgacgcttgagcggcgctgtcaaacgtgtacacataattgttgagatctttttgaatttgacgataatctacaacaccgtcctcccacgtgcccgacaccggcccgttgccagtgccggaaaaatagttgtcattcgtataatttgttacgccggtccagccgcggccgtacatggcgacgcccacaattattttgttgggatcgacgccttgtttcagtaacgcatcgacagcgtagtgtgtagtgtatagctcttccgagttccaacttggcgcgtagactgttgtttggtagcccaaatccgtgtttgaccaagcccctttaaaatcgtaactcatgagaaatattttgcctaatgacttttgcgcttcggcgtagtttaccacggcaatcttgtcgtaacccgcgcttatagcgcttgttaattcgtaaaccctgccggtttgcgcttcgaggtcgtctagcattgcgcgcagctcctccaacaacaaaatgtatgttttggcgtcacgctccgcatcgcccagcgacgggttagcccctttgccgcccggaaattcccaatcgacgtctacaccgtcaaagaatttccacacttgcaaaaattccttaaccgaatctacaaaaacgtttcttttttcaacatcgtgcatgaaatagaatgggtccgacagagtccagcctcctattgaaggaagaatctttagatgtgggtttgctaatttcgccgccatcaactgtccaaaattgcctttgtacggctcgttccaagcggacacgcctttttggggtttttgtacggcggcccacggatcgtggatggcaactttgaaatcttcgcgtcccttgcacgatcgttgcagagattcaaaacttccgggtatcgttttgagggcgtcgtttattccatcgccaccgcagatgggtatgaaaccatacaacaagtgcgataaatttggcaagggaactttgtctacgggaaagttgcgcccgtacacaccccactcaacaaagtacgcagcgacaattttatcctctctcctgccaggtttgttgttttccagccatgtgtattcgagcggtgccagatggccgccgtcggtgtctgcgactttgaccaacacgggatcgctcacggaacagccgtcctcattgcaaagtttgacacgcatgttaaattgcccgctcacaagaactttaatggtagcccttttactttcggcgtcgcctttccatacctgctgctcgtcaaacaacacgtacgctatgtcgccaatgtcgccgttccagacgttccaactgacttgaacgtcgacttgttctttaggctttattaaattttcgtaagcggtggcctcgtaatttatttctacgagcgcataattgcgatcggcccaatcgatcaccggcgtgccgggaatcgcgttagaaacggcgaccaaccacaaaacgtttaacaatttgtacaacattttaatttatcttaattttaagttgtaattattttatgtaaaaaaaaatgaacaaaattttgttttatttgtttgtgtacggcgttgtaaacagcgcggcgtacgaccttttgaaagcgcctaattattttgaagaatttgttcatcgattcaacaaagattatggtagcgaagttgaaaaattgcgaagattcaaaattttccaacacaatttaaatgaaattattaataaaaaccaaaacgattcggccaaatatgaaataaacaaattctcggatttgtccaaagacgaaactatcgcaaaatacacaggtttgtctttgcctattcagactcaaaatttttgcaaagtaatagtcctagaccagccaccgggcaaagggccccttgaattcgactggcgtcgtctcaacaaagtcactagcgtaaaaaatcagggcatgtgtggcgcctgctgggcgtttgccactctggctagtttggaaagtcaatttgcaatcaaacataaccagttgattaatctgtcggagcagcaaatgatcgattgtgattttgtcgacgctggctgtaacggcggcttgttgcacacagcattcgaagccatcattaaaatgggcggcgtacagctggaaagcgactatccatacgaagcagacaataacaattgccgtatgaactccaataagtttctagttcaagtaaaagattgttatagatacattaccgtgtacgaggaaaaacttaaagatttgttacgccttgtcggccctattcctatggccatagacgctgccgacattgtcaactataaacagggtattataaaatattgtttcaacagcggtctaaaccatgcggttcttttagtgggttatggtgttgaaaacaacattccatattggacctttaaaaacacttggggcacggattggggagaggacggatttttcagggtacaacaaaacataaacgcctgtggtatgagaaacgaacttgcgtctactgcagtcatttattaatctcaacacactcgctaattggaacataatcatatcgtctcagtagctcaaggtagagcgtagcgctctggatcgtatagatcttgctaaggttgtgagttcaagtctcgcctgagatattaaaaactttgtaattttaaaaattttattttataatatacaattaaaaactatacaattttttattattacattaataatgatacaatttttattattacatttaatattgtctattacggtttctaatcatacagtacaaaaataaaattacaattaatataattacaaaattaactacatgaccaaacatgaacgaagtcaatttggcggccaattcgccttcagccatggaagtgatgtcgctcagactggtgccgacgccgccaaatttggtgttctccatggtggttatgaggttgcttttttgttgggcaataaacgaccagccgctggcatctttccaactgtcgtgataggttgtgttgccgatggtcgggatccaaaactcgacgtcgtcgtcaattgctagttccttgtagttgctaaaatctatgcattgcgacgagtccgtgttggccacccaacgcccttctttgtagatgctgttgttgtagcaattactggtgtgtgccggcggattggtgcacggcatcagcaaaaacgtgtcgtccgacaaaaatgttgaagaaacagaattgttcatgagattgccaatcaaacgctcgtccaccttggccacggagactatcaggtcgtgcagcatattgtttagcttgttgatgtgcgcatgcatcagctcaatgttcattttcagcaaatcgttttcgtacatcagctcctcttgaatatgcatcaggtcgcctttggtggcagtgtctccctctgtgtacttggctctaacgttgtggcgccaagtgggcggccgcttcttgactcggtgctcgactttgcgtttaatgcatctgttaaacttgcagttccacgtgtttttagaaagatcatatatatcattgtcaatcaaacagtgttcgcgtgtcaccgactcggggttatttttgtcatctttaatgagcagacacgcagcttttatttggcgcgtggtgaacgtagacttttgtttgagaatcatactcacgccgtctcgatgaagcacagtgtccacggtcacgttgatggggttgccctcagcgtccaaaatgtatacctggcactcgtccgtgtcgtcctggcactcgagcttgctgtacattttcgaagtggaaatgccgcatcgccacgatttgttgcacgtgtggtgcgcaaagtgattgttattctgccgcttcaccaactctttgcctttgacccactggccgcggccctcgttgtcgcgaaaacagtcgtcgctgtcactgccccaacggtcgatcagctcttcgcccacctcgcactgctgcctgatgctccacatgagcaaatcttctttgcccacattcagcgttttcatggtttcttcgacgcgtgtgttgggatccagcgagccgccgttgtacgcatacgcctggtagtaccccttgtagccgataatcacgttttcgttgtagtccgtctccacgatggtgatttccacgtccttttgcagcgtttccttgggcggggtaatgtccaagtttttaatcttgtacggacccgtcttcatttgcgcgttgcagtgctccgccgcaaaggcagaatgcgccgccgccgccaaaagcacatataaaacaatagcgcttaccatcttgcttgtgtgttccttattgaagccttggtgtgactgatttactagtagcattgaggcatcttatatacccgaccgttatctggcctacgtgacacaaggcacgttgttagattaataatcttatctttttatcttaattgataagattatttttatctggctgttataaaaacgggatcatgaacacggacgcccagtcgacatcgaacacgcgcaacttcatgtactctcccgacagcagtctggaggtggtcatcattaccaattcggacggcgatcacgatggctatttggaactaaccgccgccgccaaagtcatgtcaccttttcttagcaacggcagttcggccgtgtggaccaacgcggcgccctcgcacaaattgattaaaaacaataaaaattatattcatgtgtttggtttatttaaatatctgtcaaattacaatttaaataataaaaagcgtcctaaagagtattacacccttaaatcgattattagcgacttgcttatgggcgctcaaggcaaagtatttgatccgctttgcgaagtaaaaacgcaactgtgtgcgattcaggagagtctcaacgaggctatttcgattttgaacgttcatagcaacgatgcggccgccaacccgcctgcgccagacattaacaagttgcaagatctgatacaagatttgcagtctgaatacaataaaaaaattacatttaccactgatacaattttggagaatttaaaaaatataaaggatttaatgtgcctgaataaataataataagggttttgtacgatttcaacaatgaacttttgggccacgtttagcatttgtctggtgggttatttggtgtacgcgggacacttgaataacgaactacaagaaataaaatcaatattagtggtcatgtacgaatctatggaaaagcatttttccaatgtggtagacgaaattgattctcttaaaacggacacgtttatgatgttgagcaacttgcaaaataacacgattcgaacgtgggacgcagttgtaaaaaatggcaaaaaaatatccaatctcgacgaaaaaattaacgtgttattaacaaaaaacggggtagttaacaacgtgctaaacgttcaataaacgcttatcactaagttaatatactaaaaatcacatagtcactacaatatttcaaaatatgaagccgacgaataacgttatgttcgacgacgcgtcggtcctttggatcgacacggactacatttatcaaaatttaaaaatgtctttgcaggcgtttcaacaacttttgttcaccattccatctaaacatagaaaaatgatcaacgatgcgggcggatcgtgtcataacacggtcaaatacatggtggacatttacggagcggccgttctggttttgcgaacgccttgctcgttcgccgaccagttgctgagcacatttattgcaaacaattatttgtgctacttttaccgtcgtcgccgatcacgatcacgctcacgatcacgctcgcgatcacgttctcctcattgcagacctcgttcgcgatctcggtcccggtctagatcgcggtcacgttcatcgtctcccaggcgagggcgtcgacaaatattcgacgcgctggaaaagattcgtcatcaaaacgacatgttgatgagcaacgtcaaccaaataaatctcaaccaaactaatcaatttttagaattgtccaatatgatgacgggcgtgcgcaatcaaaacgtgcagctcctcgcggcgttggaaaccgctaaagatgttattttgaccagattaaacacattgcttgccgagattacagactcgttacctgacttgacgtccatgttagataaattagctgaacaattgttggacgccatcaacacggtgcagcaaacgctgcgcaacgagttgaacaacaccaactctattttgaccaatttagcgtcaagcatcacaaacatcaacggtacgctcaacaatttgctagccgctatcgaaaacttagtaggcggcggcggtggcaattttaacgaagccgacagacaaaaactggacctcgtgtacactttggttaacgaaatcaaaaatatactcacgggaacgctgacaaaaaaataagcatgtccgacaaaacaccgacaaaaaagggtggcagccatgccatgacgttgcgagagcgcggcgtaacaaaacccccaaaaaagtctgaaaagttgcagcaatacaagaaagctatcgctgccgagcaaacgctgcgcaccacagcagatgtttcttctttgcagaaccccggggagagtgccgtttttcaagagttggaaagattagagaatgcggttgtagtattagaaaatgaacaaaaacgattgtatcccatattagatacgcctcttgataattttattgtcgcattcgtgaatccgacgtatcccatggcctattttgtcaataccgattacaaattaaaactagaatgtgccagaatcagaagcgatttactttacaaaaacaaaaacgaagtcgctatcaacaggcctaagatatcgtcttttaaattgcaattgaacaacgtaattttagacactatagaaactattgaatacgatttacaaaataaagttctcacaattactgcacctgttcaagatcaagaaataagaaaatccattatttattttaatattttaaatagtgacagttgggaagtaccaaagtatatgaaaaaattgtttgatgaaatgcaattggaacttcccgtcactttactattaggtctttagatttggtaaggctagcacgtcgacatcatgtttgcgtcgttgacctcagagcaaaagctattattaaaaaaatataaatttaacaattatgtgaaaacgatcgagttgagtcaagcgcagttggctcattggcgttcaaacaaagatattcagccaaaacctttggatcgtgcagaaattttacgtgtcgaaaaggccaccaggggacaaagcaaaaatgagctgtggacgctattgcgtttggatcgcaacacagcgtctgcatcgtccaactcgtccggcaacatgttacaacgaccagcgcttttgtttggaaacgcgcaagaaagtcacgtcaaagaaaccaacggcatcatgttagaccacatgcgcgaaatcatagaaagtaaaattatgagcgcggtcgttgaaacggttttggattgcggcatgttctttagccccttgggtttgcacgccgcttcgcccgatgcgtatttttctctcgccgacggaacgtggatcccaatggaaataaaatgtccgtacaattaccgagacacgaccgtggagcagatgcgtgtcgagttggggaacggcaatcgcaagtatcgcgtgaaacacaccgcgctgttggttaacaagaaaggcacgccccagttcgaaatggtcaaaacggatgcgcattacaaacaaatgcagcggcagatgtatgtgatgaacgcgcctatgggcttttacgtggtcaaattcaaacaaaatttggtggtggtttctgtgccgcgcgacgaaacgttctgcaacaaagaactgtctacggaaaacaacgcgtacgtggcgtttgccgtggaaaactccaactgcgcgcgctaccaatgcgccggcaagcgacggctttcgttcaaaacgcacagctgcaatcacaactatagtggtcaagaaatcgatgctatggtcgatcgcggaatctatttagattatggacatttaaaatgtgcgtactgtaacgattttagctcagacagtcgggaagcgtgcgattctgttttaaaacgcgagcacaccaactgcaaaagttttaacttgaaacataaaaactttgacaatcctacatactttgattatgttaaaagattgcaaagtttgctaaagagccaccactttagaaacgacgctaaaacactcgcctattttggttactatttaactcatacaggaaccctgaagaccttttgctgcggatcgcaaaactcgtcgcccaccaaacacgatcatttaaacgactgtgtatattatttggaaataaaataaacctttatattatatataattcttttatttatacatttgtttatacaattttatttacgacaaatattgactcgttgttcagaaagtttaataagcttgtcaatttcttcggcttgcaaagggctgccaacgcgttcgttttgaatgcgcgtaatccggtttacggtattgttggcgcgaacaataaactcctcaactggcaaattaacaattttgtttgcgtactcattgtgcaccgcggccaggttttgtagaatgttttcgggaaaaatggcaattctattaaatttgacatgtttttgattgtatacatagttttgatattcttccagcgtaggatattcgtttaaactcttgacgcattcaatgtacaatttgtgcagtgacaaaattctgttaaaatccaaacgagaacatttctcaaaagttatttcttgtccgttgaaatgtacactttgcaattgtttcaataaactgtcgtaaaaagtttttccttcttcaagcacaaacgcggggcgcatcgtgttatctacaacgcttatgtacttgtcaaaatcttcaattatatgataaaaatacaaatatctctccgcgtttatacacgtgtcgtttaaaacatgttcgtcaacaactccgttatgatttactttcaaaaatttcaaatcttgcaaagcgtccgagttggtcaacttgttgataataaatttgtctttgcattcaaacgctctgtttgcaatccactccacagcgtccaaaacggacatgcgtttaaacatgttgatacgttttagacaatacgctcgtttttttaccgcctcaacgttcacgtccgtgtagtcgcaccattgcaggatttgcaacatgtcctcggcaaaatgcgcgaactgccgcagcttttcctttccaaaatgttgattgtcgtgtttaaaaagcaacgttgaaatttccgagacataccacaaagccgtgggcaattttactttgatcagcggctccatagccaggttgctgaacccgatcatgcattccgtgttgttaatgcggtaaatgacatagcgtttgaagtagtcctttacattatcgtcaatgtattctgcgtcgtttatgtgcttgtacagcaaatagtacataaggcccgcgttaaacgcgacctttttagcgtcaaaatacgtgcacgccaacacgtaatcgttgtattcgtcgaattgctcgttgggcactatggcgcccgtaaaagggcgtctgctgcgcggtgacaaacgcgttccatgctgaatcaactgcttcaaactttccaaattataacaatattcaattgaatttttaatctctttattttggttccataaaagaggaaactcgagtcggcttttaaatttggtcaaactgccctgaattgtttcaaacaagttgtaatgtgttaacaatatggccggcacaccgctatcgttggctaaaatacaatcggggaatcgaatattttctacgttgctgtaatcgtacgcttcgtcgtcgtcgttggcaacaacatcgtcggtttcggcgtccacgctcgctaacttgttctgatagtgtaaatttttcattacatcaaaagcgtatgacttgttgcgattgtgcaaataatttatggccgtgctaatggtgctgtcgataattttatcaaaattgagaacatcggcgttatacagcgttttataaaattctgttgacttgaacgtgtttacaaactcatttttatttttaatctggtcaaaattcatactagaattgttagtttgtttgatttcgccgaatagccgctggcggagacgcttcagcttgtccacctcgtttaacacgttggcgtccgtcggcatggaattgataaatttgaaccgaacaaaagacagcagttcatcttttttcgataaaaaattttcggttgtaatgatatcgtagttaaattctttggttaaattgacccattcgaccatttcatcgttgcgataaatcttgcagtccgagttgttgacaaacgccgaggcaacggacaaatcaatctgttccgtgttattattgatggcataaaacacaatgcgttcgaaactaaacggtttttcgtttagtaaatttttgcaaacgtttgcctcatttttggaaatttggccgtcggtcaccatgtacaaaagttttaacttgccgtctagcaagtttatattcttgtgaatccactttatgaattcgctgggcctggtgtcagtaccctcgccattgcggcgcaaataacgactcttgacgtctccgatttctttttggcggcaataagcactccaatgcaaatacaaaactttgtcgcaactactgatgttttcgatttcattctgaaattgttctaaagtttgtaacgcgttcttgttaaagtaatagtccgagtttgtcgacaaggaatcgtcggtggcgtacacgtagtagttaatcatcttgttgattgatatttaattttggcgacggatttttatatacacgagcggagcggtcacgttctgtaacacgagtgatcgtgtatgtgttatctctggcagcgcgatagtggtcgcgaaaattacacgcgcgtcgtaacgtgaacgtttatattataaatattcaacgttgcttgtattaagtgagcatttgagctttaccattgcaaaatgtgtgtaatttttccggtagaaatcgacgtgtcccagacgattattcgagattgtcaggtggacaaacaaaccagagagttggtgtacattaacaagattatgaacacgcaattgacaaaacccgttctcatgatgtttaacatttcgggtcctatacgaagcgttacgcgcaagaacaacaatttgcgcgacagaataaaatcaaaagtcgatgaacaatttgatcaactagaacgcgattacagcgatcaaatggatggattccacgatagcatcaagtattttaaagatgaacactattcggtaagttgccaaaatggcagcgtgttgaaaagcaagtttgctaaaattttaaagagtcatgattataccgataaaaagtctattgaagcttacgagaaatactgtttgcccaaattggtcgacgaacgcaacgactactacgtggcggtatgcgtgttgaagccgggatttgagaacggcagcaaccaagtgctatctttcgagtacaacccgattggtaacaaagttattgtgccgtttgctcacgaaattaacaacacgggactttacgagtacgacgtcgtagcttacgtggacagtgtgcagtttgatggcgaacaatttgaagagtttgtacagagtttaatattgccgtcgtcgttcaaaaattcggaaaaggttttatattacaacgaagcgtcgaaaaacaaaagcatgatctacaaggctttggagtttactacagaatcgagctggggcaaatccgaaaagtataattggaaaattttttgtaacggtttcatttatgataaaaaatcaaaagtgttgtatgttaaattgcacaatgtaactagtgcactcaacaaaaatgtaatattaaacacaattaaataaatgttaaaatttattatttaatattattttgtcattgcttgtcatttattaatttggatgatgtcatttgtttttaaaattgaactggctttacaagtagaattctacttgtaacgcacaatcaggtatgagtcataagctgatgtcatgttttgcacacggctcataaccgaactcgctttacgggtagaattctacttgtaacgcacaatcaaaaagatgatgtcatttgttttttaaatcgagatgatgtcatgttttgcacacggctcataactgaactcgctttacgagtagaattctacttgtaacgcacgatcagtggatgagtcatttgttttgcaatatgatatcatacaatatgactcatttgtttttcaaaattgaacttgatttacgggtaaaattctacttgtaaagcacaatcaaaaagatgatgtcatttgtttttcaaaactgaactcgctttacgagtagaattctacgtgtaaaacacaatcaagaaatgatgtcatttgttataaaaataaaagctgatgtcatgttttgcacacggctcataaccgaactcgctttacgggtagaattctacgcgtaaaacatgattgataattaaataattcatttgcaagctatacgttaaatcaaacggacgttatggaattgtataatattaaatatgcaattgatccaacaaataaaattgtaatagagcaagtcgacaatgtggacgcgtttgtgcatatcctagaaccgggtcaagaagtgttcgacgaaacgctaagccagtaccaccaatttcctggcgtcgttagttcgattattttcccgcaactcgtgctaaacacaataattagcgttttgagcgaagacggcagtttgctcacgttgaaactcgaaaacagttgttttaattttcacgtgtgcaataaacgctttgtgtttggcaatttgccagcggcggtcgtgaataatgaaacgaagcaaaaactgcgcattggagctccaatttttgccggcgaaaagctggtttcggtcgtgacggcgttccatcgtgttggcgaaaacgaatggctgctaccggtgacgggaattcgagaggcgtcgcagctgtcgggacacatgaaggtgctgaacggcgtccgtgttgaaaaatggcgacccaacatgtccgtctacgggactgtgcaattgccgtacgataaaattaaacagcatgcgctcgagcaagaaaataaaacgcccaacgcgttggagtcttgtgtgctattttacaaagattcagaaatacgcatcacttacaacaagggggactatgaaattatgcatttgaggatgccgggacctttaattcaacccaacacaatatattatagttaaataagaattattatcaaatcatttgtatattaattaaaatactatactgtaaattacatttttatttacaatcatgtcaaagcctaacgttttgacgcaaattttagacgccgttacggaaactaacacaaaggttgacagtgttcaaactcagttaaacgggctggaagaatcgttccagcttttggacggtttgcccgctcaattgaccgatcttaacactaagatctcagaaattcaatccatattgaccggcgacatcgttccggatcttccagactcactaaagcctaagctgaaaagccaagcttttgaactcgattcagacgctcgtcgtggtaaacgcagttccaagtaaatgaatcgtttttaaaataacaaatcaattgttttataatattcgtacgattctttgattatgtaataaaatgtgatcattaggaagattacgaaaaatataaaaaatatgagttctgtgtgtataacaaatgctgtaaacgccacaattgtgtttgttgcaaataaacccataattatttgattaaaattgttgttttctttgttcatatacaatagtgtgttttgcctaaacgtgtactgcataaactccatgcgagtgtatagcgagctagtggctaacgcttgccccactaaagtagattcgtcaaaatcctcaatttcatcaccctcctccaagtttaacatttggccgtcggaattaacttctaaagatgccacataatctaataaatgaaatagagattcaaacgtggcgtcgtcgtccgtttcgaccatttccgaaaagaactcgggcataaactctatgatttctctagacgtggtgttgtcgaaactctcaaagtatgcagtcaggaacgtgcgcgacatgtcgtcgggaaactcgcgcggaaacatgttgttgtaaccgaacgggtcccatagcgccaaaaccaaatctgccagcgtcaatagaatgagcacgatgccgacaatggagctggcttggatagcgattcgagttaacgctttggcagtcacggtcagcgttttgatggcgatcacgttgagcgagtgcactaacgctgctttgtaagtctctcccaacatgcgcacggtcacgcgccgagtcgtgctaagcaacatgcgtttcatggccggaatgagagaagtgttaatttttttcaacatgcttttaaacccggacattagcatatcaaagccaatgtccgtagcaataccgaaaacgagcgcgtaatcttccaaaaacgatgttataattgactccaagtcttggtcgctgattgaacggtcgagcgcctcaaaatgttcgacacgtgcacgttcgttaccgcggtaattgtatgcgatcggagttttagtaaagccggtttcggccgtgtacgtgatctggacgggcgacccgttgacgatcatgcccaaatcgtttagtgttggatttttgttaaaaagtttttcaaattccaagtctgtggcgttatcgcgcacgctgcgccattgcgctagtattgcgttggagtccacgttgggtcgtggcggtagtatgctggaaggcgctttgtaatcaaaatcgcgcagttcgctaaaaatgttgttggccagcattttgaaagtgacaaagatcgtgtcgcccagcacgaatccgatgagcgattcccaccatctaaacgaacaaccgccgttgaatagctctctgccgaaacgtcgacagtaggcttcgttgaattcgcctttaaagcgttcgggaaacaaggggtcgggatcgggccgaacgttaaaagccggcacatcgtccacgcccatgatcgtgtgttcttcggtgcgcaagtatgggctgttaaagtacattttggacagcgagtccactaagatgcatttgttgtcgagcgtgtatctaaactcggcagactgaacttgggtttcggcgccttcacgcatggccgccgccctgtccaggtggtagcacgcgggctgcgcgtaacccacactagtctcggaggtctgcgtgtacatgaacggtgtcgtgttggacacgacgccggtttcgtgaaacggatagcagctcatgctttcacacccgcgcttgctgaaagccagtttgacggccagcgctttgtcggccaatttcggcggcacataataatcgtcgtcacttgacgcgggacgcagcgtgtagtcgattagtatatgcggaaacctagtgcgccatctcgaaataaactcgagacgatgcatatgtatggcatatctactggcattagttaaatcgacggctgttaaaaccgccatgttatataggacttaaaataaacaacaatatataatgaaatatttattagattatattataacaatacatttgcatttattatgattatattataacaatatatttgcatttattataacaatactttttatttattatgattatattataacgatacattttatttagacattgttatttacaatattaattaactttttatacatttttaaatcataatatataatcatttcgttgtgcatttcaaagcttttgatagcttcaaagtaatacatgaatttagagtattcaggaaaatgataaacgttggtaaacccgcatttggtacaatataacacgggatttttataatacagtttagtttttttacacaatttgcaatagttgttagttgtaggtttcaaaggaaacgcgattgcgccgtccaatacctgggtaaactttttgactttaacagtggcaaacacggttcctttgatacccgaaaatcggttgtcttgcagagcggccatcatttcgcttggctcttgaagtataaaacagttgacgtcatccaccacgtcgggtctggtgcacatgcttcggtagcgctgcaacactatattggtgtatgtttccctgagaacgagaccgccggtggtgctaagatcgattgtttgaatgcgctcgttgggctctttgtgatttcgaattatgcgccgaattatttcaaacactttgcagttgtgatcgtcaattctcaattctttaacttccgtcgtgtgctctaaatttacagggaagatgtattggtaaaaaaacctctctctggctaaatagctgaggtcgaccaaattgatagaaggatatatttcgtacgaggtttttggaacgttgtgatatagatagcatttttgacagcagatgtctatgcggtcaggatcgtccaacggcttttcgatgtgaaccacaacatacaaaaaccattcgcgcgtgttgtctttgaatctataattgcaagtggtgcatcgcgaatcgctcatgtgctccatagtcttcttgtatttcacaggcctgcttgcaaatttgcctgtcatgcgcatatctttgctgtttatgtagcccataatgtaattggtggaaaattttagcgtggctttcatgatgtcgcgttctaaatcgctcatgaaatgcatacgtagatcgcgctcttgtttgaaatccagtttgtcgctgtacgcgggcaaaccttcaaacttgttcccaaactcgggcggcacaaaatatccatcttttctgttgacgactggttttttacttacaacgctgctgtgctccaacggcttggccggagaggtgcgcgtaggctgtttaggcggagagatgcgcgtaggtggtttgatgttagattttggcggcggacgaacaggcgacggcggcgagttggcggcaggcgttggcaaagatttggcacgacccttgcccccggtctttggcgcgtcaaaaatgttattctctcgaaaaaagcggttcattgtaactgttagttagcactcagaaatcaacacgatactgtgcacgttcagccatcgagaggctttatatatggaaaccttatctatagagataagattgtatatgcgtaggagagcctggtcacgtaggcactttgcgcacggcaccagggctgtggaggggactggctatataaagcccgtttgcccaactcgtaaatcagtatcaattgtgctccggcgcacacgctcgcttgcgcgccggatagtataagtaattgataacgagcaacgcaacatgataagaaccagcagtcacgtgctgaacgtccaggaaaatataatgacgtcaaactgtgcgtcatcgccatattcgtgcgaggcaacgtccgcttgcgcagaagctcagcaggtaatgatcgataactttgttttctttcacatgtacaacgccgacatacaaattgacgcaaagctgcaatgcggcgtgcgctcggccgcgtttgcaatgatcgacgataaacatttggaaatgtacaagcatagaatagagaataaatttttttattactatgatcaatgtgccgacattgccaaacccgaccgtctgcccgatgacgacggcgcgtgctgtcaccattttatttttgatgcccaacgtattattcaatgtattaaagagattgaaagcgcgtacggcgtgcgtgatcgcggcaatgtaatagtgttttatccgtacttgaaacagttgcgagacgcgttgaagctaattaaaaactcttttgcgtgttgttttaaaattataaattctatgcaaatgtacgtgaacgagttaatatcaaattgcctgttgtttattgaaaagctggaaactattaataaaactgttaaagttatgaatttgtttgtagacaatttggttttgtacgaatgcaatgtttgtaaagaaatatctacggatgaaagatttttaaagccaaaagaatgttgcgaatacgctatatgcaacgcgtgctgcgttaacatgtggaagacggccaccacgcacgcaaaatgtccagcgtgcaggacatcgtataaataagcacgcaacgcaaaatgagtggcggcggcaacttgttgactctggaaagagatcattttaaatatttatttttgaccagctattttgatttaaaagataatgaacatgttccttcagagcctatggcatttattcgcaattacttgaattgcacgtttgatttgctagacgatgccgtgctcatgaactatttcaattacttgcaaagcatgcaattgaaacatttggtgggcagcacgtcgacaaacattttcaagtttgtaaagccacaatttagatttgtgtgcgatcgcacaactgtggacattttagaatttgacacgcgcatgtacataaaacccggcacgcccgtgtacgccacgaacctgttcacgtcaaatccccgcaagatgatggctttcctgtacgctgaatttggcaaggtgtttaaaaataaaatattcgtaaacatcaacaactacggctgcgtgttggcgggcagtgccggtttcttgttcgacgatgcgtacgtggattggaatggtgtgcgaatgtgtgcggcgccgcgattagataacaacatgcatccgttccgactgtatctactgggcgaggacatggctaagcactttgtcgataataatatactaccgccgcacccttctaacgcaaagactcgcaagatcaacaattcaatgtttatgctgaaaaacttttacaaaggtctgccgctgttcaaatcaaagtacacggtggtgaacagcactaaaatcgtgacccgaaaacccaacgatatatttaatgagatagataaagaattaaatggcaactgtccgtttatcaagtttattcagcgcgactacatattcgacgcccagtttccgccagatttgcttgatctgctaaacgaatacatgaccaaaagctcgatcatgaaaataattaccaagtttgtgattgaagaaaaccccgctatgagcggtgaaatgtctcgcgagattattcttgatcgctactcagtagacaattatcgcaagctgtacataaaaatggaaataaccaaccagtttcctgtcatgtacgatcatgaatcgtcgtacatttttgtgagcaaagactttttgcaattgaaaggcactatgaacgcgttctacgcgcccaagcagcgtatattaagtattttggcggtgaatcgtttgtttggcgccacggaaacgatcgactttcatcccaacctgctcgtgtaccggcagagttcgccgccggtccgtttgacgggcgacgtgtatgttgttgataagaacgaaaaagtttttttggtcaaacacgtgttctcaaacacggtgcctgcatatcttttaataagaggtgattacgaaagttcgtctgagttgaaatcccttcgcgatttgaatccgtgggttcagaacacgcttctcaaattattaatccccgactcggtacaataatatgatttacaccgatcccactactggcgctacgactagcacagacgcgccgtccacaaactatttaaacaggctaactccaaacatgttcttgaccatcttggctgtagtagtaattattgctttaataattatatttgttcaatctagcagtaatggaaacagctcggggggtaatgtacctccaaacgccctgggaggttttgtaaatcctttaaacgctaccatgcgagctaatccctttatgaacacgcctcaaaggcaaatgttgtagataagtgtataaaaaatgaaacgtatcaaatgcaacaaagttcgaacggtcaccgagattgtaaacagcgatgaaaaaatccaaaagacctacgaattggccgaatttgatttaaaaaatctaagcagtttagaaagctatgaaactctaaaaattaaattggcgctcagcaaatacatggctatgctcagcaccctggaaatgactcaaccgctgttggaaatatttagaaacaaagcagacactcggcagattgccgccgtggtgtttagcacattagcttttatacacaatagattccatccccttgttactaattttactaacaaaatggagtttgtggtcactgaaaccaacgacacaagcattcccggagaacccattttgtttacggaaaacgaaggtgtgctgctgtgctccgtggacagaccgtctatcgttaaaatgctaagccgcgagtttgacaccgaggctttagtaaactttgaaaacgacaactgcaacgtgcggatagccaagacgtttggcgcctctaagcgcaaaaacacgacgcgcagcgatgattatgagtcaaataaacaacccaattacgatatggatttgagcgattttagcataactgaggttgaagccactcaatatttaactctgttgctgaccgtcgaacatgcctatttacattattatatttttaaaaattacggggtgtttgaatattgcaaatcgctaacggaccattcgctttttaccaacaaattgcgatcgacaatgagcacaaaaacgtctaatttactgttaagcaaattcaaatttaccattgaagattttgacaaaataaactcaaattctgtaacatcagggtttaatatatataattttaataaataattaaataatatacaatgtttttattaattatatttttaatattaattaaagtattaatatttaaaaaaatgaatcaaattcatctaaagtgtcacagcgataaaatttgtcctaaagggtattttggcctcaacgccgatccctatgattgcacggcgtattatctctgtccgcataaagtgcaaatgttttgcgaattaaatcacgaatttgacttggactccgccagctgcaagcctatcgtgtacgatcacacgggcagtgggtgtacggctcgcatgtatagaaacttgttactatgaagaacgggtttccagttgcacaacactattatcgatttgcagttcgggacataaatgtttaaatatatcaatgtctttgtgatgcgcgcgacatttttgtaggttattgataaaatgcaccgacacgttgcccgacattatcattaaatccttggcgtagaatttgtcgggtccgttgtccgtgtgcgctagcatgcccgtaacggacctcgtacttttggcttcaaaggttttgcgcacagacaaaatgtgccacacttgcagctctgcatgtgtgcgcgttaccacaaatcccaacggcgcagtgtacttgttgtatgcaaataaatctcgataaaggcgcggcgcgcgaatgcagctgatcacgtacgctcctcgtgttccgttcaaggacggtgttatcgacctcagattaatgtttatcggccgactgttttcgtatccgctcaccaaacgcgtttttgcattaacattgtatgtcggcggatgttctatatctaatttgaataaataaacgataaccgcgttggttttagaaggcataataaaagaaatattgttatcgtgttcgccattagggcagtataaattgacgttcatgttggatattgtttcagttgcaagttgacactggcggcgacaagatcgtgaacaaccaagtgactatgacgcaaattaattttaacgcgtcgtacaccagcgcttcgacgccgtcccgagcgtcgttcgacaacagctattcagagttttgtgataaacaacccaacgactatttaagttattataaccatcccaccccggatggagccgacacggtgatatctgacagcgagactgcggcagcttcaaactttttggcaagcgtcaactcgttaactgataatgatttagtggaatgtttgctcaagaccactgataatctcgaagaagcagttagttctgcttattattcggaatcccttgagcagcctgttgtggagcaaccatcgcccagttctgcttatcatgcgcaatcttttgagcattctgctggtgtgaaccaaccatcggcaactggaactaaacggaagctggacgaatacttggacaattcacaaggtgtggtgggccagtttaacaaaattaaattgaggcctaaatacaagaaaagcacaattcaaagctgtgcaactcttgaacagacaattaatcacaacacgaacatttgcacggtcgcttcaactcaagaaattacgcattattttactaatgattttgcgccgtatttaatgcgtttcgacgacaacgactacaattccaacaggttctccgaccatatgtccgaaactggttattacatgtttgtggttaaaaaaagtgaagtgaagccgtttgaaattatatttgccaagtacgtgagcaatgtggtgtacgaatatacaaacaattattacatggtagataatcgcgtgtttgtggtaacttttgataaaattaggtttatgatttcgtacaatttggttaaagaaaccggcatagaaattcctcattctcaagatgtgtgcaacgacgagacggctgcacaaaattgtaaaaaatgccatttcgtcgatgtgcaccacacgtttaaagctgctctgacttcatattttaatttagatatgtattacgcgcaaaccacatttgtgactttgttacaatcgttaggcgaaagaaaatgtgggtttcttttgagcaagttgtacgaaatgtatcaagataaaaatttatttactttgcctattatgcttagtcgtaaagagagtaatgaaattgagactgcatctaataatttctttgtatcgccgtatgtgagtcaaatattaaagtattcggaaagtgtgcagtttcccgacaatcccccaaacaaatatgtggtggacaatttaaatttaattgttaacaaaaaaagtacgctcacgtacaaatacagcagcgtcgctaatcttttgtttaataattataaatatcatgacaatattgcgagtaataataacgcggaaaacttaaaaaaagttaagaaggaggacggcagcatgcacattgtcgaacagtatttgactcagaatgtggataatgtaaagggtcacaattttatagtattgtctttcaaaaacgaggagcgattgactatagctaagaaaaacaaagagttttattggatttctggcgaaattaaagatgtagacgttagtcaagtaattcaaaaatataatagatttaagcatcacatgtttgtaatcggtaaagtgaaccgaagagagagcactacattgcacaataatttgttaaaattgttagctttaatattacagggtctggttccgttgtccgacgctataacgtttgcggaacaaaaactaaattgtaaatataaaaaattcgaatttaattaattatacatatattttgaatttaattaattatacatatattttatattatttttgtcttttattatcgagaggccgttgttggtgtggggttttgcatagaaataacaatgggagttggcgacgttgctgcgccaacaccaccacctcctcctcctcctttcatcatgtatctgtagataaaataaaatattaaacctaaaaacaagaccgcgcctatcaacaaaatgataggcattaacttgccgctgacactgtcactaacgttggacgatttgccgactaaaccttcatcgcccagtaaccaatctaaacccaagtcgccaactaaatcaccaaacgagtaaggttcgatgcacatgagtgtttggcccgcaggaagatcgctaatatctacgtattgaggcgaatctgggtcggcggacggatcgctgccgcgacaaactgttttttctacttcatagttgaatccttggcacatgttggttagttcgggcggattgttaggcaacaaggggtcgaatgggcaaatggtaacatcagactgatttaaattagggtcttgacgacaagtgcgctgcaataacaagcaggcttcggcggtttctccggcgtctttaccttgcacataataacttccgccggtgttattgatggcgttgattatatcttgtactagtgtggcggcactaaacaagaaataaccgccggtggccaagagtatgcccgttcctcctacttttaagctttgcatgtaactatgtagacgggggttttgctgcagtgcgttttgaacaccttcgggcgtgcgcacgttggtttccgggaagttttgtttgactgcattggatcgcgtctgcttggtgtggtaattaaagtctggcacgttgtccacgcgccgcaattggctcaatgagtttatttgagggtctgaaatgccctgaaatactccgcgtatgttggggacatcgttgttacgagtaattctgtttatgtctgaagtgctcacaaactggttgttagataattgatagcccggctgaaatctgttgtttccaatgttgcgtacactgggcgcgttgagcacatttgtgaaaccggccggagtgcttgttaaaagacgcgtattatcagtaataaaactggcctgattaggatacaatttattgactgcgcgaagatttgaaaaaaaactcattttaaagcaaacttatttaataaatatatcacagtaaaggttttgcaaaactgccgtcgtcaatactacacggcagcggcgtcatgttggtaaaatctaatcttctccttgctttagattctgggcgagaaggcgcatttgttgtgtaagttatttcgacgtctgcattatttgttgtgtaaggtatctcgacgtatgaagcaactttaacattgttataattttttttaaatattgatgcgctccacggcgcgcgttgatacggatgatatctctccattgtatgatcgctaaagttatataccgtttcaataaatacgtttaaacccaacatgttaattataatattcataatagtttgtttgttttcaataattatttttactgttttgaaatctaaaagaggtgacgatgacgaatcagacgacgggtttagttgctataacaaaccaattggagtaaattttccgcatcctactagatgtgacgctttctacatgtgtgtcggtttaaatcaaaaattagagttaatctgccctgaaggatttgaatttgatctagatgttaaaaattgtgttcctatatcagattatggatgtaccgctaacaaaacagaataaaaataaaataaaatttatatagattaataaaataaaatttattataatacttttacaaatacattgttataaaataatacatataaatatacataatcattcattagttttattttcggaaataagtttacacaatttattagtcaacatagtatagttttgtttgaactttaaaaattgagcttgcgattcagacacttgattagacaactgcatttgcatattattaattaatacttgctgatctttagatttattaacacaaatttctaaatccgacttagccttagtcaactcagtctgagtaacaatatgctgctgttgtaacaaagtatgctcgccctgtaacatggtcattttatgctcatttaaactatttttagcacgtaattctgctaattcttgttgcaatttagcaactacattttcatcgttagaatcattatttacagtattattatttaacaaattttcccaatgactcgccattactctgcgatcgcgtttaactacagcaggcataaattctacatagccgcttttactatacatacgacaattggccgtagttacactacagaaacaggtatattctaatttatcagtataaattcttatataacacttaaaacacactgcatgattacaacgagaagttgtcacaaaagatgaactaatattcttgatatctttgtaggtggtgaaacatatgttgcatgtcaattcatgttctatttcttcttcagcctcttcatttgcttcttccatctcatctaccggagtaaactgcgccagaggtagatcatcattatcatcctcattattattagtagatagctgtgtagactgcaacgacgctgacggtatcagttgagtagactgcaacgacgctgacggtatcagttgagtagacggcaaatcatcatcagaaaacaaatcgggagaatttgctctagtcggcaaagatcgttctgcggacgtttcttgcgacgcagacactaaatcaactatatcaacgatatcattatcaacctcaccaacgttaccgacgctgctactgctgttaccgctgttgctgttgttgcggttggcttcccaataacgttgagccgcttccgagggacgacgatatctgaagactgctcggctgccatcagcggcggttgagggcgacgccgaaaaatcgatgcgtcgtcgcaacgataaattattgcgacgattgctgcttgcgctgccgctgctggcgttaagttgacgactcatgacgtaataactttatgttagttaaacaaactagtagtaatactgctctagcaccgaggtgttagcgatcaaacgaatactgttgaactgtgcttacgagtaggacgaggcctgtatttatactgtttattagtactgcacgactgataagacaagagtggtggggaacttgccagacaaaaatgaacttttttgtaatgcaaaaaagttgatagtgtagtagtatattgggagcgtatcgtacagtgtagactattctaataaaatagtctacgatttgtagagattgtactgtatatggagtgtcaggcaaaagtgaacttttttgcattgcaaaaaaattcattttaaatttatcatatcacaggctgcagtttctgttatctgtcccccactcaggcgtgcagctataaaagcaggcactcaccaactcgtaagcacagttcgttgtgaagtgaacacggagagcctgccaataagcaaaatgccaagggacaccaacaatcgccaccggtctacgccatatgaacgtcctacgcttgaagatctccgcagacagttgcaagacaatttggacagcataaaccaccgagacagaatgcaagaagaacaagaagaaaacctgcgctatcaagtgcgtagaaggcagcgtcaaaaccagctccgctccatacaaatggaacagcagcgaatgatggcggaattaaacaacgagccggtgattaattttaaatttgagtgtagtgtgtgtttagaaacatattcccaacaatctaacgatacttgtccttttttgattccgactacgtgtgaccacggtttttgtttcaaatgcgtcatcaatctgcaaagcaacgcgatgaatattccgcattccactgtgtgctgtccattgtgcaatacccaggtaaaaatgtggcgttccttaaagcctaacgctgttgtgacgtgtaagttttacaagaaaactcaagaaagagttccgcccgtgcagcagtataaaaacattattaaagtgctacaagaacggagcgtgattagtgtcgaagacaacgacaatacttgtgacataaatatggagaatcaggcaaagatagctgctttggaagctgaattggaagaagaaaaaaatcacagtgatcaagtagcttctgaaaaccgacagctgatacaggaaaatactcgtctcaacgaacagattcaagagttgcagcatcaggtgaggacattggtgccgcaacgtggcattacggttaatcagcaaattggccgtgacgacaatgcgccagccgagctgaacgagcgttttcgctcacttgtctattcgactatttcagagctgtttattgaaaatcgcgttcatagtattcaaaattatgtttatgccggaacttctgctgctagttcatgtgatgtaaatgttactgttaattttgggtttgaaaattaatgtgatatgaaatgtatatataaaaatgatggaataaataataaacatttttatactttttatgctttttttattttcatgtgattaagaaacttttaagatggatagtagtaattgtattaaaatagatgtaaaatacgatatgccgttacattatcaatgtgacaataacgcagataaagacgttgtaaatgcgtatgacactatcgatgttgaccccaacaaaagatttataattaatcataatcacgaacaacaacaagtcaatgaaacaaataaacaagttgtcgataaaacattcataaatgacacagcaacatacaattcttgcataataaaaatttaaatgacatcatatttgagaataacaaatgacattatccctcgattgtgttttacaagta

SEQ ID NO: 3 - DNA, 131526 bp, Rachiplusia ou multiple nucleopolyhedrovirus
gaattctactcgtaaagcgagttcggttttgaaaaacaaatgatgtcattcttgatcatgttttacgagcagaattctacccgtaaagcgagttcaggtttaaaaacaaatgacatcatttatataatgacatcatctctgatcgcgtgttacaagtagaattctacccgtaaagcaagtttagttttgaaaaacaaatgagtcatatttaacacgttaataatctttttagcttatgactcaagttatgagccgtgtgcaaaacatgacatagcctatgagtcataattgatcgtgcgttacaagtaaaattctactcgtaaaacgagttaaaaagggtcatatttaaatttagttgagtttatgagataagattaaaagcacgtgtaaaatgtttccttcgcgttggcacaattatttacaatgcggccaagttataaaagattctaatctaatatgttttaaaacccctttgcggcccgagttgtttgcgtacgtaactagcgaagaagatgtgtggaccgcggaacagatagtgaaacaaaaccccaatatcggagcaataattgatttaaccaacacgtctaaatattatgatggggtgcattttttgcgggcgggcctattatataaaaaaattcaagtacctggccagactttgccgcctgaaagcatagttcaagaatttattgacacggtaaaagaatttacagaaaaatgtcccggcatgttggttggcgtgcattgcacacacggtattaatcgcaccggttacatggtgtgcagatatttaatgcacaccctgggtattgcgccgcaggaagccatagatagattcgaaaaagctagaggtcacaaaattgaaagacaaaattacgttcaagatttattaatttaattaatacacgccgtttaaacctagggtaacgatcattcccccggttcgtgccaacagcgacggctacaagtcgccgcccgcgttgatgcgctgcacctcgagcaattcgttgacgccttcctctgtgtggccaaacacgtcgagcgggtggtcgatgaccagcggcgtgccgcatgcaacgcacaggtatctgtacaccgagtgattgtcgggcgaaggtacgtcggcctccaagtggcaatattggcaaattcgaaaatatatacaattgggttgtttgcgcatatcaatcgtggcgttgggcatgtacgtatgaacgttgatttgcatgcaagccgaaattagatcattccgactagtgcgattgaaacgttgtacatcctcgtttttaatcatgccgtcgattaaatcgcgcagccgagtcaaatggtcaaagtgcggaataatgttttctttgtattcccgagtcaagcgcagcgcgtattttaacaaactagccattttgtaagttagtttcatttaatgcaactttatccaataatatattatgtatcgcacgtcaagaattaacaatgcgcccgttgtcgcatctcaacacgactatgatagagatcaaataaaacgcgaattaaatagcttgcgacgcaacgtgcacgatctgtgcacgcgttccggcacgagctttgattgtaataagtttttacgcagcgatgacatgacccctgtagtgacaacgatcacgcccaaaagaactgccgactacaaaataaccgagtatgtcggtgacgttaaaactattaagccatccgatcgaccgttagtcgaatcaggaccactaatgcgagaagccgcgaagtatggcgaatgcattgtataacgtgtggagtccacttattagcgcgtcatgtttagacaagaaagctacatatttaattgatcccgatgattttattgataaattgaccctaactccatacacggtattttataatggcgggggtttgatcaaaatttccggactgcgattgtacatgctgttaacggctccgcccactattaatgaaattaaaaattccaattttaaaaaacgcagcaagagaaacatttgtatgaaagaatgtgcagaaggaaagaaaaatgtcgttgacatgctgaacagcaagatcaatatgcctccgtgtataaaaaaaatattgggcgatttgaaagaaaacaatgtaccacgcggcggtatgtacaggaagagatttatattaaactgttacattgcaaacgtggtttcgtgtgccaaatgtgaaaaccgatgtttaatcaatgctctgacgcatttctacaaccacgattccaaatgtgtgggtgaagtcatgcatcttttaattaaatcccaagatgtttataaaccaccaaactgccaaaaaatgaaaaatgtcgacaagctttgcccgtttgctggcaactgcaagggtcttaatcctatttgtaattattgaacaataaaacaattataaattttgaatttgtttatttttattaacaatacaaaccaaacgcaacaagaacatttgtagaattatctataattgaaaacgcataattataatcgtcaaggtaatgtttaaaatcattttcaaatgattcacagttaatttgcgacagtataattttgttttcacataaactagacgcttttatctgtctgtcgtcttcttcgtattctttttctttttcatttttctcttcataaaaattcacataattattatcgtatccatatatgtatctgtcgtaaagagtaaattttttgttgtcataaatatatatgtcttttttaatggggtgtatagtaccgctgcgcatagtttttgtaaaatttaaaacggtgctattttctggtaattcttcggagtgtgttgctttaattattaaatttatataatcaatagatttgggatcgtcggttttgtacaatatgttgccggcatagtacgcagctggctctaaatcaatatttttaaacaacgctggatcaacattaccattttttagcaacactggattaacataattttccaaaatgctgtacgaaccgtttaacaaaaacagttcacctccgttttctatactatcgtctgcgagcagttgcttgttgttaaaaataacggccattgtaatgaaacgcacaaactaatattacacactaaaaaaatctatcatttcggcttaatatatagttgctgatattatgtaaataattaaaatgataaccatctcgcaaataaataagtattttactgttttcgtaacagttttgtaataaaaaaacctataaatatgccggattattcataccgtcccaccatcgggcgtacctacgtgtacgacaacaaatattacaaaaacttgggttctgttattaaaaacgccaagcgcaagaagcacctaatcgaacatgaagaagaggagaagcacttggatcccttagacaattacatggttgccgaagatccttttctaggacctggcaagaaccaaaaactcactcttttcaaagaaatccgtaatgttaaacccgataccatgaagttgatcgtcaactggagcggcaaagagtttatgcgtgaaacttggacccgtttcgttgaggacagtttccccattgtaaatgaccaagaggtgatggacgtgttcctcgtcgtcaacctcagacccacacgccccaataggtgctacaagttcctcgctcaacacgctcttagatgggacgaagactacgtgccccacgaagtaatcagaattgtggagccatcttacgtgggtatgaacaacgagtacagaattagtctggctaagaagggcggcggctgcccaatcatgaacattcacagcgaatatactaattcgttcgagtcgtttgtgagccgcgtcatatgggagaatttctacaaacccatcgtttacattggcacagactctggcgaagaagaggaaatcctaattgaggtttctctcgttttcaaagtaaaggagtttgcaccagacgcacctttgttcactggtccggcgtattaaaaacacgatacatttttttagtagatttattaagcgctagattctgtgcgttgttgatttacagacaattgttgtacgtattttaataattcattaaatttataatctttagggtgatatgttagagcgaaaattaaatgattttcagcttctttatatctgaatttaaatattaaatcttcaatagatttgtaaaataggttgcgattagtttcaaacaagggttgcttttccgaaccaataactggactatctaatggattttcgctcaacgtcacaaaacttgccaaatcttgtaacagcagtctagctttgtcaatattcgtttgtgttttgttttgcaataaagcttcgacgtcgttcaaaatatcatgcgcttttgtatttttttcatcattgtcgttagtgtacaattgactagaagtaaacacgttaaacaaactttgaacatatttaacatcaggcttgttagctttattagaccgattatcgtcgtcgtcccaaccctcgtcgttagaagtcgcttccgaagacgattttgccatagccacacgacgcctactaattgtgtcggctaacacgtccgtgatcgagctttttggaattatttctgattgcggacgtttttgggcgggttttaatctaactgtgcccgattttaattcagacagcacgttagaaagcgatggtgcgggcggtggtaacatttcagacggcaaatctactaatggcggcggtaatggagctgatgacaaatccaccatcggcggaggtgcaggcggggcaggcggggctggcggcggaggcggaggcggaggtggtgatgcagacggcggtttaggctcaaatgtcttaggcaacacagttggcaactcaagtattgtattagtttcgggtactgtttttggtttgaccggtcttagacgagtgcgatttttttcgtttctaatagcttccaacaattgttgtctgtcgtctaaaggtgcaacgggttcaggttcagtcggcattggtggagcaggcggcaattcagacattgaaggaggaggtggtggcggtggtggtggtggcgctggaatgttagacgcaggagaagatggtggcggaggtgccgtcggtataatttgttctggtttagtttgttcgcgcgcaattgtgggtaccggcgcaggtgctgttggttgcacaacggaaggtcgtctacttcgaggcagcgcttggggtagtggcaattcaatattataattggaatacagatcgtaaaaatctgctataagcattgtaatttcgctatcgtttaccgtgccgatatttaacaaccgctcaatgtaagcaattgtattgtaaagagattgtcttaagctcggatcccgcacgccgataacaagccttttcatttttactacagcattgtagtggcgagacacttcgctgtcgtcgacgtacatgaatgctttgttgtcaaaaacgtcgttggctagctttaaaatatttaaaagaacatctctgtttagcaccaccgtgttgtcgtaaatgttgtttttgataatttgcgcttccgcagtatcgacacgttccaaaaattgatgcgcatcaattttgttgttcctattattaaataaataagattgtacagattcatatctacgattcgtcatggccaccacaaatgctacgctgcaaacgctgatacaattttacgaaaactgcaaaaacgtcaaaactcggtataaaataatcaacgggcgttttggcaaaatatctattttatcgcacaaacccactagcaaattgtatttacagaaaacaatttcggcgcacaattttaatgctgacgaaataaaagtccaccagttaatgagcgaccacccaaattttattaaaatttattttaatcacggttccattaacaaccaagtaatcgtgatggactacatcgactgtcccgatttatttgaaacgctacaaattaaaggtgaactttcgtaccaacttgttagcaatattattagacaactgtgtgaagcgctcaacgatttacacaagcacaatttcatacacaacgacataaaactcgaaaatgtcttatatttcgaagcacttgatcgtgtgtatgtttgcgattacggattgtgcaaacacgaaaactcacctagcgtgcacgacggcacgttggagtattttagtccggaaaaaattcgacactacaactatgcacgttcgttcgactggtacgctgtcggcgtgttaacatacaagttgctaaccggcggccgacacccatttgaaaaaagcgaagacgaaatgttggatttaaatagcatgaagcgtcgtcagcaatacaatgacattggtgttttaaaacacgttcgtaacgttaacgctcgcgactttgtgtattgcctaacgagatacaacatagattgtagactcacaaattacaaacaaattataaaacatgaatttttgtcgtgaaaatgccacttgttttaaaagtagaattttacgtgtaaagtaatgtgtatgtcaataaaaatcataaaattattatgaatgtttattttttaaaaacgcttcaaatatataataaaaacaatctacatctatttcttcacaatccataacacacaacaggtccatcaatgagtttttgtctttatccgacatactatgtgcatgtaacacatcaaatacatcttttaaatttttatacacatctttacattgtctaccaaaatctttaataactctgtaacaaggaaaagactcttcttcttgtgtggttttgccgcgcagatattgaaataaaatgtgcatgcacgacaacttgtgtttactaaaatgctctttgcctataccgcaaaacctaccatatatttcggcaattacacgcggacaattgtacgattcgtctaggtgtaaacgatcgtcataatcactcttgcgcaaacgaataaattttttcacggcttccgacaaacgaggcgccaattcggcgggcacgctttgatacattattctgtgaacataagtcaccacacaaaatttattgtaccaccatccgacaacgttgttgttagggttaaacacggtggaaagacgcagcagttttccgtttctcatgaaatattcaaagcggcccaaaataatctgcaagcaatccaacatatcttgagaaatttctcgttcaaaattgtttaaagagaatatctgccatccgttttgaacgcgcacgctgacgggaaccaccgcatcgatttgttccaacacttcacgaacgttatcgttgatacccatcatttcgctggtgctgaaccaatgggaaaggcttttgatggaatcgcacgcgtctatcatcttgaccgcttcgtcaaaggtgcaactgccgctttttaaacgccgcatggcggtcacgtcccgctctatgcacgacataccgtttacgtacgattctgataggtattcctgaactatacggtaatggtgatacgactcgccatacacgtcgtgcacctcattgtatttagcataataattgtaaactattaactttgcagcgagagacatgttgtcagtaaaacggtgctaggctgaataatattgatgtacaggcacgcgtgctatttatatataatttcgcaaggaggggagcacagctgttgtcggttgttatcataaagaatggtcgtctgttatatcacatacttggcagctttaaacatgaagcgtcgtcattgtaaattaaattctctgcctcaagaattatttgaaaaaattgtcgagtatttatctttatctgattactgcaatttggtgcttgtgtgtaaaagaccttctagtaaatataacgtgatatttgatagtattaatcaccagcatttaaaaggcgtttataaaaagacagacgtgcaaataacaaactacaacaaatacattaactgtatttgcaacgaattgagacaagacgaattctatgccaaatcatcatggattgcgagtatttgcggtcaccagagagcgacaatttttagtgtaacaaataaacaagtagaaatgaaatatcatttgtataatgtagcaattgtggaaagtgaagattgcaacgaattttacccatttgagccaacgagcgattgtttaatatgcaaacaaaaaaaccaatgtcctcgtaattcatttattgtttcgttgtgtaaatatatgaaaaaacaaaatgtacaatcaaactttatatattatttatacgaaataaatacataataattattatacatgtttctttattttacaatacttcctgtataacctctttaactacattaggagtacaatttacgtcgattacacgtttagctatttttctgattttgtaatgtttatcgtaaagtttttcgttaatacattgaatcgccaacaagggatttgggtgcacaccatcatagagcacttccatgtcgtcttcaaaacgcatttttcgcttgcgaaaatgccgctcttggcccaaaacaaaagcaagtttgatgcggtcatcgattcgttccgaaaatacggccaaatgctggtgcttggtgatgtcgcgcggaaacgtcaccgtaccattctggctttccgttacgacggcggtttttaatttttcagccgactgcagcatgttaagtttggcgtcgagttcgtgcaaacgcaattcaaactgctcaaacctgttacccacctcgttcttaaacgtttcgtgggtgaccataaatttttcgctgtttgcattcaatttttttacatgttttaaaacagattcaatcttgtcgcgcaaatcatcacgctcgccttcagtttgaatgtgcagcaacgcgttgcttttgttggcaaaatttaactgcatcaaaatttccaacaacccgtgcttggtcgcgaacaatgcgcccaacgagttgagatcgcgtttggaacttggcttgtgaaaaacaatttcgtttaaatggtaaatttgatcgccgtcccaattgcaatcaagtatgtcatcgtgcgcaatttcaagacctttgcaaaaatcaatcacattatagcattttgcgttcgtgtcgctgtgcacatatctgtacttgaaagtgtgtgtgttgcatttgaatgagtcccatttaacgatgtgcgaccattgttgggcgtttatgtggtactttttgtagtcgtctggattaaaccgatcttcaacggcgatgacgtcgtcgctgtcgttgtcactggaccacatccaccagttccataaccaggatagcattgctttagcttgtctagcaattcctttgttatacaacgagaaaatttcgttcccttataattatagctgtacggtgcgcgtatttgtttgttaacgttacaaaaaatatccctgtccacgtccggccaatactgcaacgtgagcgcgtcaaagtttgattcttggatatgcgggacgtacaaacgtacggcttctctcacacaatgcgcaaaactgcccggctgaatataatcgctgtccaactttgcaggtttctcaaaaaccttgtaccgatgcacgcgaacattttgagcggacgtgattttaaacttgtcggtaaatcttaaccacaaatgaaatccacggttgccggtatacatgactctggacacgttctcttccgtgtaaaacaatagaaacgccgtggcgccaatgtaaattttcagcattaaatcgtgttcatcaacataatttttgtaatcggcgtctacgacccattccctgccgccgccgtcatccaacggtttgacgtgcacgtctgacactttgttttgcacaatataattatacaattgtgcggcggtatcaaaatatctgtcggcgtgaatccagcgcgcgttaaccgtcatgaacgcgtacttgcggctgtcgttgtatgcaattgcgtcccacatcatgtcgacgcgtttctgcgtataattgcacaataacatgttgccctttgaacttgacctcgattgtgttaattttggctataaaaaggtcgcccttttaaatttgttacataatcaaattaccagtacagttattcggtttaaagcaaaaaatgactattctgtgctggcttgcactgctgtctacgcttactgctgtaaatgcggccaatatattggccgtgtttcctacgccagcttacagccaccatatagtgtacaaagtgtatattgaagctcttgccgaaaaatgtcacaacgttacggtcgtcaagcccaaactgtttgagtattcaaccaaaacttattgcggtaatatcacggaaatcaatgccgacatgtctgtccagcaatacaaaaaactagtggcaaattcggcaatgtttagaaagcgcggagtggtgtccgatacagacacggtaaccgccgctaactacctgggcttgattgaaatgttcaaagaccagtttgacaatattaacgttcgcaatttcattgccaacaaccagacgtttgatttggtcgtcgttgaagcgtttgccgattatgcgttggtgtttggccatttgtacgatccggcgcccgtaatccaaatcgcgcctggctacggtttggcagaaaactttgatacggtcggcgcggttgcgcgacaccccgtctatcatcctaacatttggcgcaacaatttcgacgacacggaggcaaacgtgatgacggaaatgcgtttgtataaagaatttaaaattttggccaacatgtccaacgcgttgctcaaacagcagtttggacccaatacaccgacaattgaaaaactacgcaacaaggtgcaattacttttgctaaatctgcatccgatatttgacaacaaccgacccgtgccgcccagcgtgcaatatctcgggggtggaattcatcttgtaaaaaacgcgccgtcgaccaaattaaatcccgtcatcaacgcgcaaatgaacaagtcaaaaagcggaacgatttacgtaagttttgggtcaagcattgacaccaaatcgtttgcaaacgagtttctttacatgttaattaatacgttcaaaacgttggatgattacaccattttatggaaaattgacgacgaggtagtaaaaaacataacgttgcccgtcaacgtgattacacaaaattggtttaatcaacgcgccgtgctgggtcataaaaaaatggtggcgtttattacgcaaggcggactacaatcgagcgacgaggccttggaagcccaaatacccatgatttgtctgcccatgatgggcgatcagttttatcatgcgcacaaattgcagcaactcggcgtagcccgcgctttggacactgttaccgtttccagcgatcaactaacagtggcgataaacgacatgttgtttaatgcgcctatctacaaaaaacacatggccgagttatatgcgctcattaatcatgataaagcaacgtttccgcctttagataaagccatcaaattcacagaacgcgtaattcgatatagacatgacatcagtcgccaattgtattcattaaaaacaacagctgccaatgtaccgtattcaaattattacatgtataaatctgtgttttctattgtaatgaatcacttaacacacttttaattacgtcaataaatgttattcaccattatttacctggtttttttgagaggggctttgtgcggctgcgcactttcagcctttataaacgctcaccaaccaaagcaggtcattattgtgccaggacgttcaaaggcgaaacatcaaaatggagtctgttcaaacgcgcttatgtgccagtagcaatcaatttgctccgttcaaaaagcgtcagcttgcggtgccggtcggttctgtgaacagtttgacacacaccatcacctcaaccaccgtcaccagcgtgattccaaaaaattatcaagaaaaacgtcaaaaaatatgccacataatatcatcgttacgtaacacgcatttgaatttcaataagatacagtctgtacataaaaagaaactgcggcatttgcaaaatttgctaagaaaaaagaacgaaattattgccgagttggttagaaaacttgaaagtgcacagaagaaaacagcgcgccgaagtattagtaaaccagctcattggaaatattttggagtagtcagatgtgacaacacaattcgcacaattattggcaacgaaaagtttgtaaggagacgtttggccgagttgtgcacattgtacaacgcagaatacgtgttttgccaagcacgcgccgatggagataaagatcgacaggcactagcgagtctgctgacggcggcgtttggttcgcgagtcatagtttatgaaaatagtcgtcggtttgagtttattaatccgaacgagattgttagtggtaaacgtttaataattaaacatttacaagatgaatctcaaagtgatattaacgcctattaatttgaaaggtgaggaagagcccaattgcgttgagcgcattaccataatgccatgtagtttaatagatactgagatctgtttaaatgttagatgccgttctccttttgccaaattcaaagtattgattattgtagatggctttgataacgattacattcaggctaccttttgtagcattagagatagtgtaacaattgttaacaaatctaacgaaaagcatgtaacgtttgatgggtttgtaaggccggacgatgaaggtacaacaatgccttatgtcattggaccattatattctgtcgacgctgctttcgccgccgaccgtaaagtgaagaacgtggtggattcaattcaaaaccaacagacaatgttaaaagtatttattaacgaggctaatgtttataacaaatggaatatgcttaaaggtttaatttataataataataatgaatctgttttagtaaataatgtagtaaaatttataaaggtagataaaaattataatattaataaaaaaaataatgttactaaatgggttcctgcgttaaattattttacgggtagacagctattaactattttatttatttttaaatttaaataaatgtattgttgaaaagttgtgttgttttattaatataacgaaaaaatacatgacataaaccgcttccaattttggtcacacaaactcttgtgtggatagtttacgtaatgagttaaataggcgggcagttgtccgctaaacgtgtcggtggtcaagtagatgtgcattaatttacgacaacccaaagcggggccgcttatgtcaagtattttttttacaaaattggtaatggtttcgttttgttccttgtataaacacatgtccgtgtgatcgttgacgcacgagttgtaagattccgctgacaagttggcaaacaagcgcttgagatgcttgagtctgcgttcaattttataatcaaacttgttggtgaaaatgtctttcagcaagcacattaactggtcgttcaaaacgcgctgcaacgacgacaccaacacatgatattcgtttccaaaaagcgaaaaatttttgatgcaacggtccgcgttgaaggaccgtttcatgatgcgcacgttgacaaaaaacacgttgaaagacagcggcgctgtggttattttaacgccattatcggtatactcgttgacatctgcgcttgttatgtcaatttgtagtgcaaatctcaccaaatcaaactcatcgttgtactgtgtctttatgcattttatatggcggtttaagtgcaagttgatttggccgtttaatctataggcgccgttttgataacatttcagcactaccaacggatccgacatgtaaacttgacgcgttaacacgtccaattcagcgtaatgttggtcgacgcatttttgtaaattagtttgcaagttgcaaaacatttttgaggaaaagccataatagtcaaaatctatgcattttaatgcgcttctgtcgtcgtcgatatggcatgtcacagctgcgcctccagttaacacgaataatccgccgttttcgcaaactacggcttcgaaacaatctttgataaatgccaactttgctctggccacaattttatcgcgcaggcgatcttcaatatcctttgtcgtaatataaggtaggacgccaagatttagttgattcaacaaacgttccataatgaatagcggcgacgcaacacgactacactgttcaaatgcgcacgcaaaacaaacccttgcaactttatttgccaatcgtaatcacagtactttttacgagtacgctatcgcgtttgtaagcacactgctttttaaaaataatttaaatttaatgtccgcgtgcaatttgatcaattcgttgatcaactttgaactcaacatgtttggtaaaagtttattgctaaatggatttgttaatttctgcattgctaacagcgacggcgttacaattcaacataaaatgttaactaacgtgttaagttttttgttggaaaaatattattaaaaataaataaataaacttgttcaatttgttttatttcttttataaaatacacaatttatttatacattaatactttggtatttattaatacaattatttacaatactttcaaatatttacaatactttattttcttaatactaaatacattaatactaaattaatactttatataataaaataatactttatataataatttttaatcatcataaacgggcaatagttttttctcttgaaatttacgctgcaactcttcgctaaaacacatgggacgtgaagtggaaacaggtggagtaggagttcttatgggtttgatgggtgacggttctttggacttgcgaaacagtacgggcgaaagcgtcggcgtgcgccgactaataatttcttcgtccggtaacggaggctcgcacattgtgcacgcgtccggtgaggtacacaaaactttcttgggcacgctgtagaccggcttgggcacgctatatgtgttgccgaaataaaactcgttgtgattgctgaacggagacgatgggtgtaaagacggcgatggctgtgaagacaagtctgaaggcgcaataaaagatgaaagtgtttctgaaaccgaagttgtggtagaaggcgggtgtgttacggcaaccacgttgctatttctgccttcggagaccacttccagcaatctagagttactctctcgttcttcgcggcgatagtcaatgtcgcaataatgttcataagatgccttttcggcttcagcacgtctttttatgtatatgttgcgacgcatctcttttaactgcacgtacaaattccaacattgcacagccagtatcgtaagcacacccattatgattacgggataattttgattaaacacagtcggctcgtgatcgcttacaatcgctcggcacatgatgcattttttgtaaatattcacatatacacagttttggctcaaggtttcggtatttgcatagtcgatttccagatacacgatagagttccagcacattgattccaaatcatagtgacgatataaaacatctagcgccggtaaatgaccatttttgaacacgtagatttgaaacgcggcaaacagcatccaacaaagcccagtgatcacgtttaccgtaatacacgtgatagcaatgtaaaagttttctttcagattaaaatttacatttgtgtttgaagaactgctgcgattttttgtccacacaattatcttccatataaaataaaacatgtaaaataatatccacatgccgaacgccagcattatcaatatagatagattaataaccgattgttttccttcaatttccagcaaaaacgcgtatctgccgtctatcactcccattatagataacacaaacactattagatatgctaataataatgaggcattgagcccgaattgtaaaactgcagtgattttatttaacatcttgaatatttaattcaacaactaagtaatggcaatatgtatcgagtactgatcgcgtttttcctgttcgtgtttctttatatagtgtaccagcccttttatcaggcatacttacatatcggacatgcccaacaagattacaatgacacgttggacaataggatagattacattgaatccgtaatgcgcagaaggcactacgtgccgattgaagcgttgcccgcaatcaggtttgatactaatcttggcacgttggccggtgacacgattaaatgcatgtcggtgcctttgtttgttagtgacattgacctgccgatgtttgattgtagtcaaatatgcgataacccatctgcggcgtatttctttgtcaacgaaacggatgtgtttgtggtcaacggccacagactgacggtgggcggatactgctctactaatagtttaccccggaactgtaatcgcgagacgagcgtcattttaatgagtctcaatcagtggacgtgcatagccgaggacccgcgttactatgcgggcacagacaacatgacgcaacttgcaggcagacagcactttgaccgcattatgcccggacaaagtgatcggaacgtcctctttgaccgattactaggcagaccggtgaacgtgaccactaacacgtttcgtcgcagctgggatgagttgttggaggacggcactaggcggttcgaaatgcgctgcaacgcccgagataacaacaataatctcatgtttgttaatccgcttaatcctcttgaatgtctcccaaacgtgtgtactaacgttagcaacgtccacaccagtgttagacctgtatttgaaacgggagagtgtgactgcggcgacgaagcggtcacgcgtgttacgcacattgtgccgggggacaggacctctatgtgtgccagcattatagatggcctggataaaagtacggcatcatataaatatcgcgtagagtgcgttaatctgtacacctcaattctaaactattctaataacaaattgttatgtcccagtgacatttttgatagtaacacggacgcagcttttgcttttgaagtgcccggctcctaccctttatcgcgcaacggcatcaacgaaccaacttatcgcttttatcttgataccagatctcgagttaattacaacgacgtcagagggcagttatcttaattgtgataacacaaacaataagtcatttaaatgttacgtaagtagttagtatataagccgtacatgttggcttgcaaattcagtcaatatcaggcttttatcatggacggtgtaaagctgctagcgacgtgcgcgctaataattttgttatcgacgacgagtacagttatcgggcacgaccgtatcacgtttacgccaatagaagatagcgcaggcctcatgtttgaacgcatgtatggcttgcgacatcatacagacgacagatttgtgttcgtgaaaaaattcaactttgtttcggtgctgcaagagctcaataatatcaaatctaaaattgaattgtatgaagcgcaagtttcaacttgctcaagcgttagacaaataaaacaaaacaggtcaagcatcatcaaagcccgcattgaaaatcagctgcagtttttgacgcaactaaacaaaaatctcatcacatactctgtggaaagcggcattttaagcaacgacgtgctggacaacatcgatttagaatatgacgatagcggtgagtttgacgtttacgacgaatacgaacagccttcgcattggagcaacatgactgtatccgacgcgcaaactttgcttcgaaacccgcccaaagacagagtaatgtttttggatacggttaccagtgacgtgagcagcaaatacgaagaatacataaattgcattgtgagtaaccgtaccgttgaaaacgagtgcatgtttttagccaacatgatgaacgtgctcaatgacaagttggacgacgcatcagctttggccaaaatgttggagcgaatagtaaaacaaacgcgaaagaacaaactcaacatctccaacacggttatagacgacgacacgctgctaacggaaatgaaaaaattaacgcaaactttatacaaccaaaaccgcgtgtgggtagtggattttaacaaggacatgaatagttattttgatttgtcgcaagcgtataaattgcatttatatgttgatttaaatacggtcattatgtttattactatgccactgttaaaatccaccgccgtttcgtttaatttgtatcgtgttatgacggtgcctttttgcaggggcaaaatgtgtctgcttatcatttcaaacaatgaatactttgggattacagacagcaaaaactattatgtgcccgtatctaataattttagacaagattgtcaaaagtttacgggctacaatgagtttttgtgtcccgaaactgagccgattgctactatgaattcgaaagtgtgcgagattgaaatgtttatgggtcgatatagcgacgatgtggacaacatgtgcgacattagggtggccaattataatcgtaaaaaagcttacgtgaacactttaatagactaccaaaaatggttgtacatttttccaaacacgaccgtgtccgtccactattattgtgacgacgcgcttgtggaagttgatacaaaagtttcgcccggcgtcggtattatgttttccactatggcgcaaacgtgttcgattagaataacccatgatgtgaccataactgtagattcgcgatttcatgtcagacattcaactacatactggcctaaaaagaaattcaattttaacaactacattgaccaaatgttgcttgaaaaagcgagcactagttttataccgactgttgacaattttacccggcccgttttattgcaacttcctcataaatttcacattaaagattacacttcgacgcctcatcattttttccatcagtctaaaatttacaccaacagcgcggcgcccgacgaagactcgcaagacgacaataataccatcataataattattgttattgtcgctgtaattctcctattctgtggattattatttttgtattgctgtataaaaaaacggtgtcatcaatcaaataacgtagttgtgcaatacaaaaataacaatgaatttgtcacaatttgtaataatttagaagacaatcgagcatacattaatttacctaattacgatagcgatgatttgccaaaaccattgtaccctttacttgactttaatgatgatttgttaaaagatgataaacctgtgttgtaccctatgattattgaaagaataaaataaaacatgtataattgaaataaatatattttattaaaaatatttttttatttatatattttctattaaatattccaatgcacacaaatgtttaatggctatcagttttaattttattaattcgtccaaacaaaaattatttacttgttgtttttcatccatttgacatatagcgtttataaataattcgctgtgttttataaacgaatcgtaaactgctggctgggcctttagcacggccggcgcattgtatttttgggtaaagtacgcaatatttttagtcaaacacagagatttcaaatctttttcatttatatccaagtcgaaacaatcgtatacaaaatctagtttttcactttcgggcgcgcccaaatactgatttacgagttcgagctgctccacctggcctttgatatcggccgctatgcacaacattttgtcgattgcagtttcattgtttttaacataataatttttaacttttttattctgcaatttaatcaaactatttaaattcgcttgaccctttttacaaagcgcagttaatatgcaagacattttgacttaataataaaaaacaaaactttaaaataatcatttattgttcaataataacaaatattccaggcttaaaagctaacgaatagggcttttcggtaattttcttattattcatgtccgtcatctgcatttctttgccgtacttgacgccgtcaatggtgcccatcatgtacattttaatctcctccgaaggtccgtctattttgtccatttcgaacaatctatcaaaatcttcaacggtcattctctgcatatcaaggggaacgtttctaatctttccggtggcgtaaattgatccgttgttgtcacggtttattatgtaaaaccgacgaatcaacatgtcgcgctcgctagttttgttcttatccggcaaatgaatgcacacgttcggttccatcttcaaaggaaaatcgctttgcaagtgtttttgcaaaatgttaccaaacatattgttgtgtttgtgaatgtctccgtattgaatgctaaaaaactggccaaagttgcttttggcacgttttatggtcccaaaatcggaaaaccaaaatccgcagggcttgccctgcactcttggaccaatggtatacgtagttttgccgttggccggctccaacaccacaatatttttatcaggctcgggatacaacttgtcttcccattcgtgcaaactgttcaaattagacagtcgacaaaattcgtttttcaaaaatctcccttcgaaacaactacaattcagtattgaaaagttgcctcgtttcacattaatcgccatctgctcctgccacaacatcttggtcaattcgtgtggctccaattgaatggacgacggcgtaaaatagcacattacgcccgtttcatcgtgtttcacgttaaaagcaccgctgttgtacggcaccagctgctggtcttcaccttccgatctttctcgctttggttggctgtcgtcgctgctcgaatatccatcgccaatcttacgtttagttgccatgctaccgacgtgcgctgtgtgctgtggttcaggtctaattgaagtgtttttcagaatataagatatataataaatatggacgactctgttgccagcatgtgcgtagacaacgcgtttacgtacactactgacgatttattaaaaaatattttttttagtcattccaaatgcgcccctttcaagttacaaaattacaccgttttgaagcggttgagcaacgggtttatcgacaagtatgtggacttgtgctctattagcgaattgcaaaagcttaattttaagatagatcggctaaccaactacatatcaaacattttcgattacgagtttgtagttttagaacacgatttgtctacagtgcacgtcattaacgcggaaacaaagaccaaactgggccatataaacgtgtcgctaaaccaaaacgacgcaaacgtgctcattctaaccgtaactttaacgagctaaaatgaacgacggcacggccccgttttattttatcagtgtgtgtgacaactttcgcgacaacaccgccgaacatgtattcgacatgttaatagaaagacatagttcgtttgaaaattatcccattgaaaacacggcgtttatcaacagcttgattgttaacgggtttaaatacaatcaagttgacgatcacgttgtatgcgagtattgcgaagcagaaataaaaaattggtccgaagacgagtgtattgaatatgcacacgtaaccttgtcgccgtattgcgcgtatgccaacaaaatcgccgaacgtgaatcgttcggcgacaacattacgatcaacgctataatagtgaaagaaggcaagcccaaatgtgtgtacaaatgcatgtctaatttacaatcgcgtatggatacgtttgttaacttttggcccggcgcattgcgtgacatgattacaaacattgcagaagcgggatttttttacacgggtcgcggagacgaaactgtgtgtttcttttgcgattgttgcgtacgcgattggcatactaatgaagacgcctggcagcgacacgttaccgaaaatccacaatgttactttgtattgtcggtgaaaggtaaagaattttgtcaaaactcaattactgtcactcacgttgataaacgtgacgacgacaatttaaacgaaaacgccgacgatattgacgaaaaatatgaatgcaaagtctgtctcgaacgccaacgcgacgccgtgcttatgccgtgtcggcatttttgcgtttgcgttcagtgttattttggattagatcaaaagtgtccgacgtgtcgtcaagacgtcactaattttataaaaatatttgtggtgtaataaaatggtgttcaacgtatactacaacggctattatgtggaaaaaaaattctccaaggagtttttaattcatattgcgcctgatttgaaaaacaacgtcgattggaacggcagcacgcgcaaacagttgcgcgttttagataagcgcgcctataagcaggtgttgcactgcaacggcagatactattggcccgatggcacaaagtttgtctctcatccgtacaacaaatctactcgcacgcacagcgcaacagttaaacggaccgacagttcgcaccgattaaaaagcgaggtagttgacaaacgaccacgccgctctttaaattctcctcgcttagacggatatgttttggcatcgtcgccaataccacacagcgattggaatgaagaattaaagatgtacgctcaaagacacggctacgacgattacgacgatttagaagatggcgaaatcaacgaacgtgactctttaaaaagtttaaacaagcatctagacaaattaaatgtattagataaacataaacaataaaacatgtattaaaaataaaactatattttgaaatatataatgtattttatttaaaaattgtctattccgtagttgaggaagttttgtcttgacttcataacttttttctccatattctgcagctcgtttacgttttttgtgacgcttttaattttctcaaaatgctggctgtcaatagttattttttgcttttgtctattaatttcttccaattgagattttaaatctcgatgtgattgagatgcgttgtaattctttgagaacatcttgagaaaacatacagatgaagtaaaacagcatcttttatccaaattaggagttaattattattcatttgtatcgcgaccatttgctcgtacacatcttcaataaaatagttatttttattgcgataagtattggcattgacattttgcaaatgtcgtaggttaaaagggcaaataggctgcgtggccgataaaagattccagttcaacaatccctcttcgcccccgtttaacttaaaaatagcgctacacgtttctgcgctatcgtgttcttgttgagtggcgcacggttcgaccagtatcattttgtgatatgcggttttgacattcatgtgcaacggaataacttgcgggtcgtcacattcgtcgaaattaagctttaaatggtgtccgtatgctttccaaagtttttcgtcgtcgaaccgcggcactgcttgcaagtcgacgcggggaaacggcgctctgtacaaaacgcctaaattcaaaaaccgatcgcattgttgcagctccgtccaatcgacgcgatttttgtaattttgaaacagcatcaaattgaacgccgcgctggcgtgcatgtttgtaattactgtgtaattgatcagcttgtgccaatactgggcattaaaattttcttcaaactcatttctaaactctggatgcgcaaacatgtgtttaatgtagtacgcgggcggggcgttgaacgcagtccatttgtcaatacacttccagtccgaatgtaacgtgttcaccaaaccgggatattcatcaaacactagcatgtgttccgaccacggtatgctgtgagcgatcaattttagttcttgcacgcggccttcgcgtaagcaatacagaatgagcgcgtcgctaatcttgacacagtcttgcatgtacgcggacagattaacgttttccatacaaaacacattgtttattaacgccgcgtttaagtgtttgtacttggacacataatcgtagttgatgtaatttttaatgggttcttgaaaccactcttttagtagtatgtgactggtcactatgcatttccaatttaatttgtgtgcgtatttttgctgcaccgacaacgagaggttattgtaatttttggatattctttccatgtttaacaagtcgccaaaggcgagtataaaatcttgcgtcaaaaatttttgctcagacaccaacgaccagatcaaatgcgatttaaacctgttggcgattgttatcgacaacggcgaaattgaaataattttccaatccaacttgttgcgaaacacgtgaataaaatcgatgcgtccgtaacattcgcttgatatgcgcttccaaaacgtatcatcttgcaaattaagcaaatagagacgattgttgggagatttgacagccaattcaataatttttatatattctttttgctttaaagcgcgttgtagcacttgggttggagccatgtcgactgttaatactacagttgctttgcattaaaatggcataattaattaagacacaacatgaaagccatctgcatcatcagcggcgatgttcatggaaaattttattttcagcaagaatccgcgaatcaaccgcttcaaattagcggctatttgttaaatttgcctcgaggtttgcacggctttcacgtgcacgaatatggagacacaagcaacggttgcacgtcggccggtgagcactttaatcccaccaatgaggatcacggcgctcccgatgctaaaattaggcatgttggcgatttgggcaacataaagtcaattggctacaattcactgaccgaagtgaacatgatggacaacgttatgtctctatatggcccgcataatattatcggaagaagtttggttgtgcacacagacaaagacgatttaggccttaccgatcatccgttgagcaaaacaaccggcaattctggcggccgtttgggatgcggaataattgccatatgtaaatgacatcatcgttttaactcgctttacgagtagaattctactcgtaaagcgagttaaaacgatgttaaaacgatgatgtcatttgtttttcaaaactaaactcgctttacgagtagaattctacttgtaaaacacaatcaaaagatgacatcatttgttttttaaaaatgatgtcatttgttttttaaaactaaactcgctttacgagtagaattctacttgtaaaacatgatcaaggaatgatgtcaatttaaaaatgatgtcatcttttatacacgattattaacatgttaataatgactcatttgttttttcaaaactaaactcgctttacgagtagaattctacttgtaaaacatgatcaaggaataatgtcatttatcaaaataaaataactatttaaataaaaaatgtttttattgtataataaattacacgtgacatttacgatggcgaacaataatttcactttttatattaggacacgatgtgtatatgggaaaacttaagcgtttcaataacgccatggtgtacacgcttaacttgcccagcttgcgactttttgaaatttgtagttttcgaggggtaccgtcgttttttaatgccacatatgtcaacttgcgatcgtacactttataatacgtgttgtagttattttcttccagaaattccctcataaagcaatccttggataaagtttttgatccgtacagttggccacaccggtccatgcacaggtacacacacgtgatggcgttttgaatgacgatgcgatttctgtcaacggcaacgcgcttgaatatggtgtcgacgttgtccgattcaatggttccgtaaacagatccgtttggatttactgccaaaaactgtcggttaataaacagctggccgggaatagacgtgcccgtaatgtgtgttagcagagctgaacaatcagccatagaggctagagctacgagtgtcagcaagcgatacatgatgaactttaattccccacagcaaactggcgcttttatatataattttgggtcatttttgacgattagataatatagagattagataataatttgtgtgattagataattgaacagtttagaaatcgaggtcgaattgtataaactgctctggcgtgtaaaactgcaaatttaagttttttgcaaacactcggtctgaatcgctaaaatctttatgaccggtggttaaattaattcggccagccgcgtcgccgacataaaaagattgttccttgtcaatatgcgtaaactgtttggccatttcgcgccacattcccgtgtcgggctttcgatgctcacccttgttgggcgacacataaaacgatatgggcacaccaatagcttttttaatattctctaatttatataataaatcgctcgctttgattttgccgtaacctaggtgggcttggtttgtaaacacaactaaatcgtagcccaattcgtacaaacgctttagcttgtgtgcgcacggaagtagttgccagtcgtctgggttttttggaaatttagattgtgtctgtgaatcgattagagtgccgtccaaatcaaaagccgcaattttggttcttttggcgccgtcatgaactgcgtacgcatacaaatcggggtgctgtaacgtccacatggtgaatgtatcttactcaaagtccattaattcgtacgcgtttgtgtccaaatcgggcgttgaaaaattgtagcttgccattagatcggatagcgattcaaattttgtaagcgtttgtagcgcacgtttggcatcttgtttaaaattacacgacgacagacagtaaaaatattcctcgataagcatgactacacccatatcactgtttaagtgctcgacgtagttgttgcatgttatgtcgcgtgtgccgcgatacgcgtgatttcggtgaaaatcacaccacaaccagtcggcgtgcgtgtaacaaagtcgacagcgaaacaatttatcgttttccaaaaaatttaaatactccacagttttgcagcttagattccgcgtttgattcaccttaaaatcgtcgtcagcctctataatctcgggcaacagcttgccttgttgccccatcgtatcgatcacctcccccaagtggcccggtgttatattaagtcgtttaaaatcatttattgcttcctgcacgtcggcctggtaatttttgaccacggacgtagaaatcaattgccgttgaagggaaataattcgtggtgtgggtatcggccgcctattgcacaattccaccagcggtggaggcaagggcgcatttacagcaaccgttgtcatttataagtaatagtgtaaaaatgcaaatattcattaaaacattgacgggcaaaaccattaccgccgaaacggaacccgcagagacggtggccgatcttaagcaaaaaattgccgataaagaaggtgtgcccgtagatcaacaaagacttatctttgcgggcaaacagttggaagattccaaaactatggccgactacaatattcagaaagaatctactcttcacatggtgttacgattacgaggagggtattaataataataataaaaaccattaaatatacataaaaagttttttatttaatctgacatatttgtatcttgtgtattatcgctaatcattgaaattgctggagtcacagcgttgcggcgagtctttatagaagaccgttgtttggctggaactgagtttttcctttttctgctgccgctaataggagtgggcacatactctgtagtaggcgttgcaacaggcaacttgagtgctattgtcttaaatttggtcatacttttggtgataaaatcgcgcgttaacatttcgtcgtaaatgttacttagcaaaggtgcaacgttgttattaaatgtctcgtttaacaagctgtaaaactccaaataaagtttatcgcgcatttcgcagttttccttcaattctgccaaatttgcgttggtaagcaccatagtctgtctttttttggtcgctggaattgctgcgttctcgcttgaagacgatgatgtcgatcggtcagccatttttttgccctgcttttcagtgtgatcaaaaataaacacaaaatctgccaattcgggcttgtttttcaccaaatcccacatggccgggctactaggccactcgggctgcttgattttagtgtaccaactattaaacaaaatatatttattgttgttgattactttcttcttgcgtttggacattttgcgttcgtcctgcatgacaggcaccacattaaggatatagttaatgttctttctttccaaaaaatttacaataacagccagctggtccatattggatttgttgtaagagctcgattctagtttattcaacagcttttcatttttgcacacagccgctgtctcttgagattgttgctccgacacgtttaccatgtttgctttttgtaaacttttgaaacgacccgtttgtattcttgatgatatatttttttaatgcccaacaacctggcaattcgtttgtgatgaagacacaccttacgcttcgaacatttgtcggtgattactgtgtaatggcctaaattagctcttatatattcttttatacgctcaaacgacacgatgtccaacatgtgcgcgcagacgttttctgtgttcatcgtgtgcttgagcgtgttgatgacttccctgaacagcgcttgtatttcgctgcgagtcaagcagtccgaattacactcgcctaagtgagtgcaatttttggggagcatcgtaatcaatcttttttagagtggcgtagaaaaagtcctgcaattgcctactatcaaaacgcgctttgacgctgcgcacaaaatcaaaaaattcaatgtaattgctgtaatcgtacgtaatcagttgcttgtcgttcatataattgaagtatttgttgagcggcacgatggccaggctgcgcgctatttcgcaattgaagcgtcgcggttttaacattatacgatagtcgttgccaaacgtgcccggcaacaacttcacggtgtacgtgttgggtttggcgttcacattgatcaagttaccgcgcacgacgcctacatatatcaaatacttgtaggtgacgccgtcatctttccattgtaacgtaaatggcaacttgtaaatgaacgcgctgtcgaaaaaccggccagtttcttccacaaactcgcgcacggctgtctcgtaaacttttgcgtcgcaacaatcgcgatgacctcgtggtatggatattttttctaaaaaagtgtcgtttctgttggccgcgggcgcgttcgcactccggtacgcgcgacgggcacacagcaggacagccttgtccggctcgattattataaacaatcctgcagcgtttcgcattttacatatttgacacttaaaaaattgcgcacacgagcaccatcatttgatacctaattgcaactgattataatacaaattataatttatcagatttacgttgaactaattttaattttttagatccgtccttgttcagttgcaagttaactaaatgacaaaattttttggttctgcaaaaccgcccttgcctgttccacccgttgtatttgaaaaaactttttttaacgcagcgacaattgtttgcataatattgccgaatgtaaacatgcaaagttttgttactttcgtcaaaacagcggttagcgttccattccataatttttttattatttattaatgagggccattgtagattgtcatcatttatacgcatcatatgatttaacaaaagcttttcgtatagcggaacttcaattcctttggaacacttttcaaacgataactcaatttgtttctcggttggtagcattttatgcttgattaacaatcgcctgacttttatagccacgtttatgtctttgcacagcaaatgtggattgtcgacaatgtaatagtgcaaagcatttgttacggcaaatgcgtagtttgatttaacgacgcccttgtttttgatgggcattgcggctttcaaaattacttgcaagcattttacgaatacttctttgtgtttaaacactaatatggacaaacatcgacgaaacaatttgtaataattataaaatcccaagttacaggttttaaactttttcgtcacttgttttataataaacaaaatttgctgaccaatgtttgcgcccacaactttaattaaccatttgtgtgcatattgattgtcttgctgttcccaattggaaaattgattgatctcgagccaccggcattggtcgtttgataccgtcgttaaggccgacgcttctgcctgtttgattacaggttctaaaagacgaaacaatagcgtaaatttgtttttgcgtcggtagtattttggcaggcaataatcgaaaaaatccgtaagcagttctttgcatctattaatatttgttgcgtacgaatcaagctttttaaaaattactttgtttgtataaaaataacgtttacgcctttcacaataataatcttcattgtagaacaaaaacggtttgcgagaattagcacgtttgtccatgattggctcagtgcaacgattgattcaaatcaaaagtgacaacacgtttgccgtagtgtgcaccggttcgcacacgtttgccgcgtatgtaatccatgtttatttcgctgtcgcaattgattacacgattgtgttgggcggcgcgttttattgagtttaggcgacgcgttgacaattccaaaggattgtaaagcgcagatttttctaaagtaaatgagtttaagtggccaccgttaaaccattccagagccacgattgtgtacagcagaaagaatatttctttgtcgacgttttcaaacgcaaatttgttttttaggcaatagtagtaaaattttaacgaattatataaataaaatataaaattgccatttttaaagtaaaattctacatccgtgacgaacaaaaggtttactattttgttttccaacaagtgtgccaattttcttaagtacatcatcgaatttttgtcgtcgtccatctcgatcaacaacacgtacggcgttttggaatttaaaattattttaaaattttcctgttgcaataattccacagcgtccgaccaatatgacgctgccacctctagacagatgtatttcttggaaaacacgtgtcgtttgataacctcgctgatggacgtgatcgattgtaaatacttttcaaacgttgcgtcttcccaaccacgcaccgacacgggcgctgtcgtgtcgggctgatgtttgaaatccaaaccactctgaattaacttggttgtgattcgtatgctcaactgttgacctaacgtgtagtggtcttcgtaggcgcgctcccacatcacgttacacacaaatttgacgagatcatcaacgtctttctgttgcaaaattcgccgcaaacgcgccacatcgcctttgtaccaccgatctcggcacacaagatgtagcattttcaaatcgtgatcgctcaagctatcaattctggttagatttatatagtcgtcgatatcctcgggcgtggcttgcgtcatgtttgtaaaacgtgcaaaatcaaatatttttatgttgtagtcgaatctaacaaatccatcggcgttcacttgcacttcacgctttacaaaacgaggtagcgtgtaatcgaacccgtttaaatagatcgcgtataaaaccaacacttcatcttccagtttgcacgcttgcggcaaaaattgtgtggtgtgctccaaccgggtgacaaacatgactatggaaaatgacgcggaattcaacagacgactagagtacgtgggcacgatcgccacaatgatgaaacggacattgaacgttttacgacagcagggctattgcacgcaacaggatgcggattctttgtgcgtgtcagacgacacggcggcttggttatgcggccgtttgccaacttgcaattttgtatcgtttcgcgtgcacatcgaccagtttgagcatccaaatccggcgttggaatattttaaatttgaagaaagtttggcgcaacgccagcacgtgggcccgcgttacacgtacatgaattacactctgttcaaaaacgtcgtggctcttaagttggtcgtgtacacgcgcacgctacaagctaacatgtacgcggacggtttgccgtattttgtgcaaaatttttcggaaacgaactacaaacatgttcgtgtgtatgttagaaaacgtgcgatgcaagtagttgcgacattaccagtttacgaacaaattattgaagatacaataaatgaactcgtcgtcaatcacgttgattagataatgaatgtagtattttagattacgagcgcgcaataactatagtttaatcgaagagaatagccgtcgccacaatggataattacaaattgcagttgcaagaattttttgaccaagcgcccgacaatgacgatcccaatttcgaacatcaaacgcccaatttattggcgcatcagaaaaaaggcatacagtggatgattaacagagaaaaaaacggccggcctaacggcggcgtgcttgccgacgacatgggactcggcaaaacgctctctgtgctaatgttaattgcaaaaaacaactgtctacaattaaaaactctgatagtgtgtcctttgtctttaatcaaccattgggtaaccgaaaacaagaaacataatttaaattttaacatgttaaagtattataaatctttggatgccgacacgtttgagcattaccacattgtggtgaccacgtacgacgttttattggcgcattttaaattgatcaaacaaaataaacaatcaagtctgttttcaaaccgttggcatcgagttgttttagatgaagcgcatattatcaaaaactgcaaaacgggcgtacacaacgccgcgtgcgctttgaccgcaacaaaccgatggtgcattactggcacaccgatccacaacaaacattgggacatgtactcaatgattaattttttgcaatgtcgtccttttaacaatccaaaagtgtggaaaatgttaaataaaaacaacgactccacaaatcgcataaaaagtattattaaaaaaattgttttaaaacgagacaagtctgaaatttcttctaacattcctaaacacacggttgagtatgtacatgttaattttaatgaagaagaaaaaacgttgtacgataaattaaagtgtgaatcggaagaggcgtatgtgaaagctgtggcagcgcgtgaaaccgaaaacgcattaagccgattgcagcaaatgcagcacgtgttatggctaatactaaaattgaggcaaatctgctgccacccatatttggccatgcacgataaaaatattttggaaacaaatggctgttttaaaatggattatatgagcagcaagtgcaaacgcgtgctcgatttggtagacaacattttgaacacaagcgacgacaagataatattggtttcgcaatgggtggaatatttaaaaatatttgaaaacttttttaaacaaaaaaacattgctacgttaatgtacacgggtcaattgaaagtggaagacagaattttggccgagacgacattcaacgatgctaccaatacccatcgaattttgttgctttccattaagtgtggcggcgtcgggttaaacttaataggcggaaaccacattgtaatgttggagcctcattggaatccgcaaattgaattgcaggcgcaagaccgaattagtcgtatgggacaaacaaaaaacacgcacgtgtacaaaatgctaaatgtggaagacaacagcatcgaaaaatacattaaacaacgccaagacaaaaagattgcgtttgtcaacacggtctttgaagagactctgctcaattacgaagacattaaaaaatttttcaacttgtagctgtaagtcgtcatgaatacccgatatgctacttgctatgtttgcgacgagttggtgtacttgtttaagaaaacgtttagtaacatgtccctttcggccgctgcgttttaccaacggcgcatggccattgttaaaaacggtatcgtgctgtgtccacgttgctcgtcggatttaaaaattgggaacggtgtttcgattccaatttacccccaccgcactcaacaacatgcacgacggtcgcgttaagacgcaagcgcttcgagttttggcccgctcgctacccccgctgtacgactcgaccgtcgatcgacacggctgcaaggtgttcacggtgcggcgctacaatagacgcgtaatcgattttgcgggcattcgcaacaaaacgctggaaattattaaaaccgatagaaacttgccgctcaacacaaaatgcaatgtgaaagttgtcgacagtgcatgcatgcactgcagaaaaagtttcgccgtttacccggccgttacctatctgcattgcggacattcgtgtctgtgcaccgaatgcgacgaaacgataaacgtggacaacacttgttctaaatgtaaaagcggtgttagatataaattaaaatacaaaactttgtaacatgttgccctacgaaatggtaattgccgtgttggcttacttgtcgccggcgcagattttaaatttaaaccttccttttgcataccaaaaaagtgtgatgtttgccagcaattctgcaaaagtcaacgaactcattaggcggcgagcgcgtgacgacgacgacaatccctatttttactacaaacaatttataaagtttaattttttaactaataaaataataaatgtttatagtaaaactgaaaagtgtattagaatgacgtttgacggtcggtatatggtcacacgtgactttttaatgtgctttgtaaacaagagttatataaagcaattgctgcgcgaggttgacactcgtattacattacagcaacttgttaaaatgtatagtccagaatttggtttttatgtaaatagcaaaattatgtttgtgttaactgaatcggtgctggcctttatttgtttaaaacattcgtttggcaaatgtgagtggttggacaaaaatataaaaactgtgtgtttacaattaagaaaaatttgtatcaataataagcaacatttgacatgtctatcgtattaattattgtcatagttgtaatatttttaatatgttttttgtacctatcaaatagcaataataaaaatgatgccaataaaaccaatgcttttattgatctcaatcccttgtcggatacaaccgctactactaccaattccgccgctaccaccactatcaacaacaacagcatagtggcttttcgacaaaacaacattcaagaactacaaaattttgaacgatggtttaaaaataatctttcatattcgtttagccaaaaagctgaaaaagtggtaaaccccaatagaaattggaacgacaacacaatatttgacaatttgagtccgtggacaagcgttccggactttggtaccgtgtgccacacgctcataggatattgcgtacgctacaacaataccagcgacgcattataccaaaaccccgaattggcttacaatctcattaacgggctgcgcattatttgcagcaaactgcccgatccgccgccgcaccaacaagcgccctggggcccggtcgccgattggtaccatttcacaattacaatgcccgaggtgtttatgaatattactattgtgctaaatgaaacacagcattacgacgaagctgcgtccctcacgcgttactggctcggcttgtatctgcccacggctgtcaactcgatgggctggcaccggacggcaggcaactcaatgcgcatgggtgtgccctacacgtacagccaaatgttgcgcggatattcattggcgcaaattaggcaagagcaaggtatacaagaaatactaaacacgatcgcgtttccgtacgtcactcaaggaaacggcttgcacgtcgattcaatatacatcgatcacattgacgtgcgcgcttacggctatttgataaattcatactttacgtttgcctattacacgtactattttggaaacgaggtaatcaacacggtgggtttgacgagagctatcgaaaacgtgggcagccccgagggagttgtggtgccaggcgtcatgtctcgaaacggcacattgtactctaacgtgataggcaactttattacgtatccgttggccgtccattcggccgattactctaaagtgttaaccaaactttcaaaaacatattacggttcggttgtgggcgtaacgaataggttggcttattacgaatccgatcccacaaacaacattcaagcgcccctgtggacgatggcgcggcgcatttggaatcgccgcggcagaattatcaactataatgccaacacggtgtcgtttgagtcgggtattattttgcaaagtttgaacggaatcatgcgcatcccgtcgggcaccacttccacgcaatcgttcagaccggccattggccaaacggctatagccaaaaccgacacggccggcgccattttggtgtacgccaaatttgcggaaatgaacaatttgcaatttaaatcgtgcacattgttttacgatcacggcatgttccagctatattacaacattggcgtggaaccaaactcgctcaacagcacaaacggacgggtggttgtgctaagcagagacacgtcggtcaataccaacgacttgtcatttgaaacgcaaagaattaacaacaacaactcgtcggaaggcaccacgttcaacggtgtggtgtgtcatcgcgttcctatcacaaacatgaacgtgccttctttgaccgttcgaagtcccaattctaatgtcgaactagtcgagcagataattagttttcaaacaatgtacacggctacggcttcggcctgttacaaattaaacgtcgaaggtcattcggattccctaagagcttttagagttaattccgacgaaaacatttatgtaaacgtgaacaacggcgttaaagccctgtttaattatccctgggtaatggtcaaagaaaataacaaagtgtctttcatgtcagctaacgaagacactactataccatttagcgttataatgaattcgttcacctctatcggggaaccggctttgcaatattctccatcaaattgctttgtgtatggaaacggtttcagattaaacaacagcacgtttgatttacaatttatttttgaaattgtttaattatatttagagaaaatgtaatattcaaaagactgactgttaacacaaaagactgatgttgttgttgctgttacaaaatagataataaaacaaaagaataaattaaaaattatttatttatttatttattaataaactgtttaattttaatgctaatgcgtacaaatcacgctgttccgacgtggacatggaattgagcaaaaaagtcttgatagtgttgatttcttcgccatcatctacttcaatatatttgatttcttcctcaatttgcatttccaagtttgcgtattcttgcaaataataatttaatcgttgggcgacctcgccaattttaaataattcattatccgataccaaatgccaccgagtgactgtgcgttccatcatcttggcactttttaatgtgaatataaaaagtttgttgtatatatatcgttaaacgtttatgtttactttcgcgttagttagtttcattgatgtaaacatttagttttataacagcgtcggtaattttattttttaaagtaaatagaccaaaatcaaaggtgtcttcgacaggtacaattattttcccatttacactgttttcgtgcacacatataattttatcaccgtttattattttgcccatacacacgtactcgtttcttctcaaaccgactatttctaaacaatttacttttctattatcgtgtgcgcaatcaaaagtaaatgaagtgctacaattgtcgtattctattacaattctgcggcatttataaaatttattaatgttgacgcaaattccatgcagcacatccattttgtacagcaaatgcggcgcaattaaaaaatttcctcgtcgttgttaataatcttgggcgctaaaaagcacgccaacacgcccacgtctttaatgcaatattctaatttgaacggctgttcctcggacatgtatattgtcacggtgggcgccaaagaagcggctttagcaaaatgacacaaataatcgcccgcaaaagtgtgcgttacggtttgctttgctttgagaacggaaaaattttcgctgtccgcgctcatctgcacgtccgccgagccaatgtcgccattggctctaaactgcaaacctttcttggaacacgacacaataatatcgtgatcaaattgcgtcatgtttttgcacacttgcgcaaaatcgacgctcgacatgtgtacgatgcaatcgtaatcgctatccggaattcccaaatgttccacgtcaatgcaaatcaacttgagcgtgtacgtgcagattctattgtcattgttaaacacgaacgccatcacatcaccctgatcttccgctctcattaatacagaactgcgctcgttaacgcatttgacaattttacttaaactgtttatggacacgttgagagtcacgttgcggtcacatctatattttttgaaaccctcggcgtgtagttgcaacgacacaagcgcgacatgcgaggtgtccataacctgcatgcttacgccttgatcatcacaatcaaaagtagcgtgcggcagcaaatccttaaaagtttccaccagcctcttcaaaactgcgccagttttaaattccgcttcgaacatttttagcagtggctctaattgcagctgctctttgatacaactaattttacgacaacgatgcgagattttattcaaccgagcgtgcatgtttgcaattatgcaagcgttattaatttttcattatcgtattgttgcacatcaacaggctggacaccacgttgaactcgccgcagttttgcggcaagttggacccaccgcgcatccaatgcaaactttccgacattctgttgcccacgaacgattgattctttgtccattgatcaaagcgagtgccttcgactttttcgtgtcctgtgtggcttgttttaataaattctttaaaaatattgtcgggtgtattattaaatagcatgtatggtatgttgaaaatgggataacgcttggcgtgcgggttgtcatgatttccgccgcgcaccacatatttgcgttcaattttatcaaaattggactggcgagacaaaaacgaaacgggcgacaggcatatttgggcatgtgtaccatcttcggccatccactcggtcaggtcttcgctgcggttaaacacacctttctgaccgtgaatgccacatatttttattccttccaaatcgtttgtggacgtgactataactattttaagcataacgttgtcgccgttaaccaccatgctggcgtcgagtttttcaattttttggtttttaatttgtctaaagtaaacgtacactttgtaaacgttaaaattgccattggtgcacgtttcaatcttgtaccggcggccgtcgtacacccaattaatctttgcgttggtcaccaacacaccggccatgtacagaacaagtccgtcgtctagcgcaacgtaatttttgtcgctactatttgtaaactttactaaacacgactgtttggttccgaccacaagcttgccttttagtttgttcaccttgttgttgtataaacaaatgggcagcgcaatgtgcggaatgtacggatcttcggcggtcatgagtttattgtctcgcaccaacgtccacaatttaaacattttattgttgagcaaaacggacttgtttaccgccacagagtaaccatttggtaaacccgttacgcaattttcttttttgtactcgaacacgggcatggcattctttagattggttagagacacaatcaatttgggtacgggcgtggtatgaaacaaatgtataaaattgcgataataatactgttccaatttggacatgagcgatttgacgtcatcgttttctacgatggcacattgaataataggattatagtatatagaatgtttatagtggtattcgtagggtgtcaataatacgttaatgtttgcctcgttgttcacccgcaacttttttttaatgcatatcattccttcgtgatgattaacgtaaagtattctgtctgtaatcttcaattcgatgggtgccaagtttcttttcatggtgtacacgataaacgacgtgtttgattttaaacattttaaatttgtgggtctatcattaaacgcgatcagcaacgagtcgtcttgaacgtcgttaaggtcgtctacgaacgcgaccagattgtgttttagcaaatatttaaatttttgcgcaaccatttcgtaatccacgttgggcaaacatgcgttgcgacaaagaaaaaactttttgcccgccacggtcatttcgccatgaaaaaaactaccaatgaatttcacaaaatcctttttttgtttcaacattttttggcgcatgctgtcgttggtgattcgcgccacctcgttgccgacgcgatattttaacacaggcaacgaaatttcaatattgttattgctgctattgtcttgttgattgggaaaaactttacgttgcttgctaaaagttttcgatacgcaatatatgagacgcccgttgactatacaatcgacaatctttttcgactctttgttgtacaaaacgctttgaattttacgacgcttgttcaccaccgtgtacgcgtcgtcgtcggccgtcttgtcgagaactcgttgatagttttgcaaaattgtcgaagttagtagcaattctatcaaataggcgtgcttgtatacaattttgttggccaaactgtctatagaatagtttatgtcatgattcataataatttttatatgttccacgagttgttgcttgtgaagtgtattgtattcaaagagaaaatcgagtggtttccatttgccgctgttcgccaaatatgtttctagtatagaatttaagtcttccgtcaccacgtaatcgctggcgtacacgtctcgagcaaacagaacgtcatcttgtttgtcgtaaactagttggattgcgcgattaatgtgtttttcttgatccacgttgccgtacaaaaacattcgtttgcaatgtttggcgtatagcttgtcgtaaaaattgtgcactaaaacgttgttgttcatcattatattgggaaaactcaaaaatctgccgtccagcataaaagttccgttaatattgttgtttgcgtcgacattgtctggttttctaaattgcttgtctaagcgcgtgccgaatataacgggcacacatttatgcattacgcaactgagctgttcattaagagcgcaacacaaataagacttgcgttcttgaatagcgcaaaaaagcataggttcattgttgtttgtagcgcaatcaaaaatatattttaatttgtatttattttcaattctatcgtacagctcgttgaaatcttgaaccacgtccgtcatcgtgaagcgattactgcgcactaattatgtccaaacgtgctcgtgaacggtccgctgtttcggatgaaacaatcaaacgcattcgacaaaacgaacactgtcatgctaaaaatgaatcttttttgggattttgcaatttggaagaaattgattattatcaatgtttaaaaatgcaatacgttccggaccaaaagtttgacaacgattttattttaacagtgtacaaaatggccaacgtggtgacgaaacaagttagaccgtattacagtattgatgaaaagcaccattacaacacggtccgtaatgtgttgattttaataaaaaatgcgcgtttagtacttagtaatattgtcaaaaagcaatactatgatgatgtgttaaaattgaaaaaaaatacagacttggaatcgtacgatccactgattacagtatttttacaaattggcgaatctgtaaatgaagaaatacaaaaactcagaaaagctttggtcgatttttttactaataaacccgacaagtcggatataaacaacccaaatgtagtttcgtatcaatttatttttggcagaatacaaaaattgtataacagggcaattaaacaaaaaactaaaactataattgtaaaacgtcctacaactatgaacagaattcaaatagattggaaaactctttccgaagacgaacaaaaaatgactagacaagaaattgccgaaaaaattataaagccttgttttgagcaatttggcactatattacacatatacgtatgtcctttaaaacacaacctaattattgtcgagtatgcaaactcagagtcggtacaaaaagccatggctgtaaatgacgacactcgatttacagttacagagttttccgtggtccagtactacaacatggccaaaacagaaatgatgaaccagcgaattgacataataagcaaggacattgaggatttaagaaatgctctaaaatcttacacataaattaaaatatcaaacaaaggaaaaaaacaattgtaacaaaaataatttacattaaagttaacaagtttttttctaatgtcgtacttttttacaatgcgtctgttgtccgtcgaacattgcaaacatattgtggacggtgcaaaatagcaaacaaaaggcacgtccgcgctctcccacgctattctaaaacgatgaatccatattaatttagcattgtcgccaaacgccgctccgctggcctctttccaataacaaatactcagaaacacaaacatgtacaattgctgccgcggtgttaactgtcgctgtttttccaaatagtctattatgggaaacaaacacttgtcacagcacaaatactcgttaattgtcacaaccgacaggcacatttggcaaaatgcgtcgcaatttttgtacggacgagattctatgtgaagttcgttgtccatgacgtcttgggtccactttttcaacaagacacttttgtatttgtagtttgtacaacttcggtacgtgttagagtatttttgataagctttaataagtttaaaactgttggagtaaggccacgtcattatgttctgcaccttttgtttaaaagacagaaattactatatgttcaaactatttaaagattattggccaacgtgcgcgacagaatgccagatatgtcttgagaaaattgacgataacgggggcatagtggcaatgcccgacactggcttgctaaacttagaaaagatgtttcacgaacaatgtattcagcgttggcgtcgcgaacatactcgagatccttttaatcgtgtaataaaatattattttaattttcccccaaaaacattagaagagtgcaacgtgatgcttcgagaaactaaagggtttataggcgatcacgaaattgatcgcgtttacaaacgcgtttatcaacgcgttacacaagaagacgctctggacattgaactagattttaggcatttttttaagatgcaatcatgacaaacgcatggtttgcgacggacgttaacctgatcaattgtatactaaaagataatttatttttagtagataataattacatcattttaaatgtgttcgaccaagaaaccgatcaagttagacctttgtgcctcggtgaaattaacgcccttcaaaccgatgcggccgcccaagccgatgcaatgctggatacatcctcgacgagcgaattgcaaagtaatgcgtccacgtaacaattattcagatctcgataacgaaaacgacatgttgcacatgaccgtgttaaacagcgtgtttttgaacgaacacgcgaaattgtattatcggcacttgttgcgcaacgatcaagccgaggcgagaaaaacaattctcaacgccgacagcgtgtacgagtgcatgttaattagaccaattcgcacggaacattttagaagcgtcgacgaggctggcgaacacaacatgagcgttttaaagattattattgatgcggtcatcaaatacattggtaagctggccgacgacgagtacattttgatagcggaccgcatgtatgttgatttaatttattccgaatttagggccattattttgcctcaaagcgcgtacattatcaaaggagattacgcagaaagcgatagtgaaagcgagcaaagtgtcgatgtttgtaataaactcgaatatccttggaaattaattacaaccaacaattgtattgtttctacggacgagtcgcgtcagtcgcaatacatttatcgcacttttcttttgtacaatacagtcttgaccgcaattcttaaacaaaacaatccattcgacgtaattgccgaaaatacttctatttcaattatagtcaggaatttgggcagctgtccaaacaataaagatcgggtaaagtgctgcgatcttaattacggcggcgtcccgccgggacatgtcatgtgcccgccgcgtgagattaccaaaaaagtttttcattacgcaaagtgggttcgaaatcccaacaagtacaaacgatacagcgaattaattgcgcgccaatcagaaaccggcggcggatccgcaagtttacgcgaaaacgtaaacaatcagctacacgctcgagatgtgtctcaattacatttattggattgggaaaactttatgggtgaattcagcagttattttggtctgcacgcacacaacgtgtagcatcgccagtatttaatagctgacctatttgttaaacaagcattcttatctcaataattggtccgacgtggtgacaattgtatccacaatcatgaaaaaagtggcgcttggaaaaattatcgaaaacacagtagaaagcaaatataaaagcagcagtgtgtcgtcgtcatcgtcaacgggagccagtgcaaaattgagtttaagcgaatattacaaaacttttgaagcaaataaagtgggccagcacactacgtacgacgtggtcggcaagcgagattacacaaaatttgacaaattggtgaaaaaatattaacatgctgcgatcaatcatgcgacgtttcaagagtacaaacaatctcagcaaaaaaccctccgattattatgtagtgttatgtccaaaatgttattttgtgacgtcggccgaagtgagcgtggctgaatacatagaaatgcataaaaattttaacacgaaattcgccgatcggtgccctaacgattttattgtgaccaactctaaaagttggaataatcatgaaaattgttctgccctattttaccctctgtgttaataaagtttgttgtttgtattttgtggttttatttatttacgctagatattgggtttaaggttcttagaaatagagttgtattttccctaccaaaagggatttgagcttcatataaatacaattttcgctcggcaaacggtttatttcactgggaggtattatatcaggcagtcaaacgtgcgcgatgaaacatcccgtttacgctagatatttggagtttgatgatgtagtgttagatttgactagtttaatatttttagagtgtgataacgctcaaaatgaagagtacattatttttatgaacgtcaaaaaagcgttttataaaaactttcacattacttgtgatttgtcgcttgaaacgcttaccgtgttggtgtacgaaaaagctcgcctaattgtgaaacaaatggagtttgaacagccgccaaactttgtaaattttatcagtttcaacgcgaccgacaacgacaactccatgataatagacttgtgttccgacgcgcgcataattgtggccaagaaactgacgcccgacgaaacgtatcatcaacgtgtgtccggatttttagattttcaaaaacgtaactgcatacctcggcctgcaatcgagtcggacccgaaagtgcgagatgtcttggatcgtgaactagaaataaaactatacaaatagaaaaaaaaataaatttattaatagttataataattatcttcgtcctcatcttcgctggtgccataatgcagtggtgtgtttgtgttttgttttaatcgtttacgcgtcgacattactttgccgataggaaattttttggatttcgcattaaatgcccgcttagcgacgcgccgtttacgactactaaacatgttgacgcgctcgtcgtcttcagtgtcatagtccgtgctagtattttcgttgttattttctatgagacgatcgtttgatttcgttttcgtagaattgtccgcgttatcgtcgctttcatcaatgtcgtctctaactatctcgtaggcggctttgcgcggaatccaagaattttgcaatgtatctattttaacgtacttttcttcgagagcttttctagctttatgcatagcaatgtcttcgtcgccgccgttcattttatgatactttgtaaacgtttcgacgaataactttttggcgcgaggaggcattttttcattgtataacatatcgggaatttgatacattgtaattagaattaagcaagttcgtcttcggttgtactgtattcggtttctgtatctgtagtggaatcctctgtactagtagtagtgtcgctattgttggcgtcaggccttggctgccatttaccgtctatcaacatgtattttttcctaacagcacaacatgctaacttggtagctatttgtgtcgacttatatttttgtaaactacgatcgtagaatttttcaaatatcctcttaccgttatagggaaggttttgataatatttaggcaacatatcaataaaagacaatataaaaactttgtgtttgtgttttatttatcacataaaatggacgtctggcaagaatcacaaccaatattagagttttttttcttacattacgagattcaacttgatactaaaattaattattaattaaattaaattttgaagcattttttcgctatcgttttcagactcaaaattatcgacgctatcgctatgaaaagcgtaaaatttgttggctttgagatattcaatattttgctcatttttaacaataaacacacgacttttttcgtcgcgtctcaccataacaccgtttttacaaatggaaatgtatttgtaaaacggcaacaaagcgtcgcgagtttttttaagtaacagcttttgctccgctgtggcggccacaaatatttttacgggcccgtcgtaattaatgtttaaattaaaatttttaagtcgacgctcccgcgatttggtttgccattctttagcgcgcgtcgcgtcgcacagcttggctacaatgtggtttttgtcaaaagaagattctatgacatgtttgaaatttaggtcgagtaaagcgcaaatcttttttaaataatagtttctaatttttttattattcagcctgctgtcgtgaataccgtatatctcaacgctgtctgtgagattgtcgtattctagcttttttagtttttcgctcatcgacttgatattgtccgacacattttcgtcaatttgcgttttgatcaacgacttgagcagagacacgttaatcaactgttcaaattgatccatattaactatatcaacccgatgcgtatattggtgcgtaaaatatattttttaaccctcttatactttgcactctgcgttaatacgcgtttgtgtacagacgtaatcatgttttcttttttggataaaactcctactgaatttgacctcatattagaccctcacaagttgcaaaacgtggcattttttaccaatgaagaatttaaagttattttaaaaaattttataacagatttgaaaaaaaatcaaaaattaaattatttcaacagtttaatcgaccaattaatcaacgtgtacacagacgcgtcggtgaaaaacacgcagcccgacgtgttggctaaaattatcaaatcaacttgtgttatagtcacagatttgccgtccaacgtgtttctcaaaaagttgaagaccaacaagtttacagacactattaattatttaattttgccccactttattttgtgggatcacaattttgttatatttttaaacaaagctttcaattctaaacatgaaaacaatctggttgacatttcgggcgctctgcagaaaatcaaacttacacacggtgtcatcaaagatcagttgcagagcaaaaacgggtacgcggtccaatacttgtactcgacgtttctcaacacggcctcgttctacgccaacgtgcaatgtttaaatggtgtcaacgaaattatgccgccgcggagcagcgtaaagcgctattatggacgtgatgtggacaacgtgcgtgcatggaccacgcgtcatcccaacattagccagctgagtacgcaagtctcggacgtccacattaacgagtcatctaccgactggaatgtaaaagtgggtctgggaatatttcccggcgctaacacagactgcgacggtgacaaaaaaattattacatttttacccaaacctaattccctaatcgactcggaatgccttttgtacggcgaccctcggtttaatttcatttgctttgacaaaaaccgtttgtcgtttgtgtcacaacaaatttattatttgtacaaaaatattgacgcaatggaggcgttgtttaaatctacaccattggtttacgcgctgtggcaaaaacataaacatgagcagtttgcacagaggctagagatgttgttgcgtgatttttgcttaattgccagttcaaacgctagttatttactttttaaacagcttacacagctcatagctaacgaagaaatggtgtgcggagatgaagaaatattcaatttaggcggccaatttgtagacatgattaaaagcggtgctaaaggcagtcaaaatctgattaaaagcacgcaacaataccgacagactttaaatacagatattgaaactgtgtcttcacgagccaccaccagtttaaatagttacatatcttctcacaataaggtaaaagtgtgtggcgccgacatatatcataacacggttgtgttacagagcgtgtttattaaaaataactatgtttgttacaaaaacgacgaacgtacaatcatgaatatttgcgctttgccctctgagtttctgtttccagaacatttgctcgacatgttcattgaatgataatataaatagagcgcatttgattgcatgcaatcagtgctttattaactttagagcaacatgtacgataaatttatgatttatcttcatttgaatgggctgcacggagaagcaaaatactacaaatatttaatgtctcaaatggattttgaaaatcaagtagccgatgaaatcaagcggttttgtgaaactcgtctaaaaccggcaattgcttgcaacactttaactgcggaaagtctcaatacgctcgtagacagcgtagtctgcaaaaatggactgttaaatccttacgccaaagaagtacaatttgcgttgcaatatctttttgacgacgacgaaatatccaaacgagatcaagatgactttaaactatttttattacataattatgacaggtgtgaaaatatggaagaatattttttaattaacaattttagcatagcagattacgaatttgaagacatgtttgaaattgttcgtatcgattgtaaaaatctgttattacttcttgctaaatataatagtaattaaaattttgtttgttttattaaaatcctgaattaaaaaaagacgaataatttgatttgcgtgcacgccaacaagattcttcgttattatgatcaatgcgtgcatcaagtttatgattttgtaattggcttctgaccagtttagccatttgagcgtatctgcattcgtcgtctagagtttcaaacaccagatcggcgcaattataaaatccttcaccgacgggatctatgcgctgccaacgcacatacattacaaattgatttgacctgtacggtattattacgggtatagaatagactagactgttgtcacataatgaatcgcccggatttggaattaaatttgaattattaccacctatgtattctaattcattccaagttattggattgcgacgatcccagtttgatttagtaataaacacttcaaaatagctaggctcgtgtatggctgttggacaaaaatgaacattcatctgataaaccggttgatagcgatttaaatatagcgtatttggcctccagttgttaaaaggttcatccattccgcttttatcaccaaacacagaattgcgattgtttgaaccggcgccgcaaagtgtgtgcggcacaattctctgtttgatcaagtcaaaatcgtcataattaggaccggccacagctgcgtattccatgtactgttgaaacatgtattgcgctgtagaagcggccgccccggattctaaatcgagagctcgatatttataatagacagatttgtaagcattgcgacacgcggcgtcgggaatgttatcgccattgtcgggccaataaaagtttccatctttaaaacatttatattgacgggccgtcggcacggacaaatagccatgagagcgcactgccggcgcgtgaattgcagtaaacaatactaataataatgcaatcattatgattatacttataaaaacactaattggaataataaccgctatcgtaatcttggtcaaaaacgttattttgcaacataataacaaaaattaaccaacaccttacagtaacatacaaaaaacaacatatataattataaactttattttttcattttatacaaacaaaatttatacgtattgttagcacattgagtgtcattttcgctgtctgaactatcacaatcatcatcatcatcatcatcatcattatagtcgtcgtcgtcaagtttgcgtttcacactgcattttttttggttaattttcactaacactggttcttttcgatcgtacaattgattctgcatgtacttttgcatgatggcggtaaaacagtttgcaattttatccttttgttcgtcgccaaatatttccagcaactcgttcataaatgtgcacaaaatgcccatgtgttttatccagctgattcgcatttttactggatcaaacaaacgcaaggggtatgctttttctgttaccttgccctcaatgtctatcaaaaggtacgggatacgatctccgttgccgggcacaaaatccgtgcctttattaaccaaaatttctctacaatgccgagccaccgtaatcacgcgtcttttgggtgacggaccctcattatcgtcagttgatttgcgttttttgcccgggttatcgttataggtcatactaaagctgtaatcggtcaacaattttgatttggcaaactcgtcatagtattcataaaaactagtctgtaaactttgcaaacatttgtccatgtccatatgacgcaatatttgttccactgccgtcctaaacgcgattctcataaaaacgggcatgtcttttttgactaaccaacccttgtatacaattttattttcactgttaagatagcaatattttttcttttttagtaatattaaaactttcattaaattttcaaatgccattttgtaaccgtccgtaaatgagttattaacgcgtgtctcaacatgtgtgcatatttgttttaatgtgtcggtttcgttggatatttcgttatagttaaatgtgggcaaaacaaatgtagaatctgtgtcgccgtatacaactttgaaaataatgctgctcagattgaatttttctaaaatttcaggatcgttgctcaaactttcaatcaaagaaatggccagccgcaactgattgcgaccaactttagtgatatagtttgcaagtactttgtaaaaaatgccataataaccgtatatgctattggcggtgcgcttcacggaattttgtttttgatcgtacagatcgtataagaatgccgattcgctttgattatcgcgattctttttaaatttgcacctttcgcttaacaattttaatagcaatttaacaactattgcgcgtgaattatggtttaaatacacgttaccgtcttcgcataaaattaaattggacaaacaggcacaaatggctatcattatagttaagtacaaagaattaaaatcaagagaaaacgcgttcttgtaaatgcccgcacgaggttttaacactttaccgcctttgtacttgaccgtttgattggcgggtcccaaattgatggcatttttaggtatgttttttataggtatcaattttcttttaagattggaaatacccgccgcggctttatccgctttgaattggcccgatattattgacaaatcgtttttgttaaaaaaatacgggtccggatcctctttgccggtgctgtcgttaatgcgcgtgtttgtgatggctgcgtaaaagcaggccacgctaatcaaatgcgaaatattacatatcacgtcgtctgtacacagacgatgcaatatacattgcgaatacacagaatcggccattttcaatttgacaaacaattttatcggcaacatgcaatcctgcacgttgtacttggcaatcacgtctaactttcgaatgttgtacatcttgaccatttcggtccaaggcaaatcaattttgttttcgcctaaatagtaactactgattgtgtttaattgaaagttttcaactttatgctgattagaatcgctgctgaaaaatttatacaaatcaatgtgaatataatagttaaaataatacgtgtctactttgttgcccaatttgtttataaacagctttgtcgtcggcgccacagccggcaaatcgtaacgcttcaataacattttggttttatttaatcgtccaaatatatagggtagatcaaatacgtctccgttaaaatctaaaatcacatcgggatttgtaatttttatcatgtcaaaaaacgctgtaatcatgtcaatttcattttgaaacataaccacatatgtgtcatcgtcatcggtttctggaatctcggtcggcagtttgtggtacataaaacaaaattttgcatactcgttgtttttgtacaccacaaatcctatagacattatacaatcaactgatgctttggacatgttgtggccgtccgaatgagtctcaatgtcatagcacgacaaaacgggcataatgccgctggttaaagtcatttcatcgactaactcaaagtcttcattgaaatgttgcaaattaaacatgcgtgtcgccgatccaccaacatagttattctgacaacattgtgttttcttgaatcgcatatatgcgccttccacaaacggcgtttgcatgtgtacacgattaacgttgtgaagaaacttgtccaaacacgccgcgttgtccgatggcgatgctttgtttctttcgtatttaattacgtttatcttgttcaaataattgccttctacgcccggcgccacaaacgtggtgtagctgatgcacttgttgcggcaagacggaaatatgtgtttgtcgtagcattgtttgtaagaatacaaatttagtttaactttaaagtaaaactgcagcaattgttctttgataattgtattacaaaatgcaaacagacacccttgtttttcatcgtaatgcaaacgaataatacgaaacgtatcggtcaaagtaatattgtattttcttggttttgcatattctgcaaagcgtgttttgagttcattgtaaggatatattttcatttttaaatatgcagcgatggcccaaatatggaggcacagacgtcaacacgcgcactgtacacgatttgttaaacaccataaacactatgagtgctcgaatcaaaactctggagcggtatgagcacgctttgcgagagattcacaaagtcgttgtaattttgaaaccgtccgcaaacacacatagctttgaacccgacgctctgccggcgttgattatgcaatttttatcggattttgccggccgagatataaacacgttgacgcacaacatcaactacaagtacgattacaattatccacagccgccggcgcccgtgcccgcgatgcaaccaccgccaccgcctcctcaaccccccgcgccgcctcaaccaccgtattacggcaattatccgtattatccgccgtatccgttttcgacaccgccgcaacagccgccagaatcgaacgtcgcgggcgtcggcggctcgcaaagtttaaatcaaatcacgttgactaacgaggaggagtctgaactggcggctttattaaaaaacatgcaaactaacatgacttgggaacttgttcaaaattttgttgaagtgttaatcaggatcgtacgcgtgcacgtagtaaacaacgtgaccatgattaacgttatatcgtctataacttccgttcgaacattaattgattacaatttcacagaatttattagatgcgtataccaaaaaacaaacatacgttttgcaatagatcagtatttgtgcactaacatagttacgtttatagatttttttactagagtcttttacttggtgacgcgaacaaattttcaatttaccacttttgaccaattgaccctatactctaacgaactttacacaaaaattcaaacaagcatacttcaaagcacagctcctctttctcccccgaccgtggaaacggtcaacagcgatattgtcatttcaaatttgcaagaacaattaaaaagagaacgcgctttgatgcaacaaatcgccgagcaacataaaattgcaaacgaaaaagtggaagctctgcaagcgcaatacaacgacttggatttaaaatataaagacatatttgaagacaaaagtgaatttgcacaacaaaaaagtgaaaacgtgcgaaaaattaaacaattagagaaatcaaacaaagaactcaacgacaccgtacaggaattgagagatgaaaatgccgaaagattgtctgaaatacaattgcaaaaaggcgatttggacgaatataaaaacatgaatcgccagttgaacgaggacatttacaaactcaaaagaagattagaatcgacatttgataaagattacgtcgaaaccttgaaagataaaattgaatcgttggaaaagcaattggatgataaacaaaatttaaaccgggaattaaaaagcaacatttcaaaaatagacgaaactacacagagatacaaacttgacgctaaagatattatggaacttaaacaatcggtatcgattaaagaccaagaaattgcaatgaaaaatgctcaatatctagaactgaacaatgcacatcaacaaactgtaaatgaattaattgcaactaaaaatgaattgtctcaagtcgcaacagccaatcaaagtttatttgcagaaaatgaagaatctaaagtgcttttagaaggcacgttggcttttatagatagtttttatcaaataattatgcagattgagaaacccgactacgtgccgatttccaaaccacaacttacagcgcaagaaagtatatatcaaacggattatattaaagattggttgcaaaaattaagatctaagctgtcaaatgtcgacgttgccaatttgcaatcaatttcagaattaaatgatttaaaaagccagattatttctattgtaccacgaaatattgtaaatcgtattctaaaagaaaattatagagtaaaagtagaaaatatcaacgcagaattgttagaaaatgttgctgtcacaagcgctgtaagcgctttagtacagcaatatgaacgatcagaaaagcaaaaagttacacttaggcaagaatttgaaataaaattaaacgatttacaaagattgttggagcaaaatcaaaccgattttgaatcaatatctgagtttatctcacgagatccggctttcaacagaaatttaaatgacgagcgattccaaaacttgaggcaacaatacgacgaaatgtctagtaaatattcagctttggaaacgactaaaattaaagagatggagaatatcgcagatcaagctgtaaaattggaaatgagtaaattaaacacacaactagatgaattaaactctttatttgttaaatataatcgtaaagctcaagacatatttgaatggaaaactagcatgcttaaaaggtacgaaacgttggcgcgaacaacagcggccagcggcgttcaaccaaacatcgaataaaattacaaaaatttatattcattttcatcttcgtcatacttcaacagccccaacacgttcatgttgtgattctcgccgttttcgacagttacgtaaataattactttaattaaattatcttccagcagcattgagatttgattaaaatccgcacatagtttttgtagcgaatccgcttcggtttttttatttgtgttgacgtagaaaacagatttgttccatttgcccaagtcggaagaggtagaacagttatccgaatcggcaatgttcaattcgtcgcttttaaactgcacaataaacttgttatcgcccgtgtcattttcttccaattcgctttttaaaacatttacattgtacgaagcgacgtgtttgtttgatcgactaatgttgatatttgcgtttgtgcaattttgcaaatttgaatatgcttcactttctttagtttcgcacaattcgatacgcgtagagttgactacgttccaattcatatacacgtttgatccattaaaaatttgttgacattttatattgtaaatggtaaagatttggttttcattgtcttttaaatatttaaacacctcattgatgtcgtcagacccttttatattgttcttgaacagatttatcagtgttttcgcattgacggaacattccacttgaaccacgtcgggatcgtcgttaagatttttgtacacaacctcaaaaacgattttgtacaaaccgctgttgattttcttgtagataaatttgtattttacaataatattgacgccatcttcattttcaaaatgtttgttcgtcaaatagtcgctcatgggcgttgcagtttcaatttccatttcacattctttgtattcgtttatctgaatcatttgactaaactttgttttcacataatttaaagtaatgtcatagcacttgccttcctccatgtctttaaaagattgcgaatcgccgtagtattcttgaattttgttgtcggacattattcgaaaagtgtaatggtattcattatcaatactcaacgtcattttgctcatcaatttaccactaatctttttgtaattttctctaatttttttgggactactggccatggccatgcgttttataagcggctcaccgctactttctccagacaaagatcttttggtcgccatattgctattgtcgatatgtgggaatctatccgatggcaaatactgaatggcgacgaaatcgaagtgtcgccagagcaccgttcgttagcgtggagggaattgattataaacgtggccagcaacacgccgctcgacaacacgttcagaacaatgtttcaaaaagccgattttgaaaatttcgactacaacacgccgattgtgtacaatttaaaaacaaaaactttaacaatgtacaacgaaagaataagagcggctctgaacagacccgttcgatttaacgatcaaacggtcaatgttaatattgcgtacgtatttttgttctttatttgtatagttttgctgagcgtgttggtcgtcttcttcgacacaaacattgcgaccgacacgaacagtaaaaatgttgcagcaaaaattaaataaactcaaagatggtttgaacgcgtttagtaacaaatcggtggtttgcgctcgctcaaaattatttgacaaacgcccaacgcgcaaacctagatgttggcgaaaattatcagagatcgacaaaaagtttcatgtttgccgacatgttaacacgtttttggatttgtgcggcggaccgggagagtttgccaactataccatgtcgttgaacccgttttgcaaagcgtatggagtcacgttgacaaacaactcggtgtgcgtgtacaaacctacagtgcgcaaacgcaaaaattttacaaccgttacggggcccgacaagtcgggcgacgtgtttgataaaaatgttgtattcgaaattagcatcaaatgcggcaacgcgtgcgatctggtgttggcagatggctcggttgatgttaatggacgcgaaaacgaacaagaacgtctcaactttgatttgattatgtgcgagacgcagctaattctgatttgtctgcgtcccggcggtaattgcgttttaaaagtttttgacgcgtttgaacacgaaacgattcaaatgcttaacaagtttgttaaccatttcgaaaaatggattttatataaaccgccttcttctcgacctgccaattccgaacgatatttaatttgtttcaacaaattagttaaaccgtattgcaacaattatgccaacgagttggaaaaacagtttgaaaaatattatcgtatacaattaaaaaacttaaacaagttgataaacttgttaaaaatataacgtgtatataaaaagccagcggcttcaaatcaggcatcattcaacatgaattcgctagccaatttgtgtttgaaaaccctgccttacaagtgtgagctgccaaagtttttacgaacaaaatattgcgaggcgtgtcactacagatttttaccaaaattttttgatgaaaaattttgtgagcaatgcatatgcaacatatgcgacaatccaaaaactataaattgtccatcatcatatatatctaaaattaaagcgaagacagaaaacaaagaaatatatgttaccggcaacacatttcttagaacgtgcaaaaacaaatgtaatcaacaatcaaaacgaaaatgtttaatttgctattttacaaatgaaagttgtaaagagctcaattgttgttggtttaataaaaactgttacatgtgtttgaaatataaaaaagatctatacaatgtaaatttgtatacgattgacgggcattattcttcatttacagctatttgtttttcatgtgtaaaaacaatcaaaacgtgccaaatttgcaatcaatctttgtttaaaatgtacaaacagaagcaagaagaacgcttgaagatgcaaccgctgtacgcaacattggccgatatagatttaaaaatattagacatttacgatgttgacaattattctaaaagaatgatattgtgtgcccaatgtcatatatttacacgctgtttttgtaccaataccatgcaatgtttttgtcctcgaccgggttataagtgtatatgtatatgcaaacgatctaaatattttaaaaatgatgtattgtatgttaaaagtaaagctgcctgttttaataaaatgaaaataaaacgagttccaaaatggaaatataatgcagattatactttcaaaagtatatataaattaataaacgtttaattttaaggatattgttatggaataaactataaaatgaatttgatgcaatttaattttttaatactttccacagacggtagattcagaacaatggcaaacatgtcgctagacaatgagtacaaacttgaattggccaaaacgggtctgttttttcacaataacctgattaaatgtataggctgtcgcacgattttgaacaaaatcaacgccaagcaaattaaacgacacacgtattcaaattattgcatatcgtcaaccaacgcgttaatgttcaatgaatcaatgagaaaaaaatcatttacgagttttaaaagctctcgacggcagtttgcatcacaatccgtggtcgttgacatgttggctcgtcgcggtttctattattttggcaaagccggccatttgcgttgttccggatgttatatagtttttaaatataaaagtgtagacgacgcccaacgccggcaccaacaaaattgcaagtttcttaacgcaatagaagactattctgataatgaacaatttggcaaattcaatgctgcggaaacagaaatactggctgccgatttgattcctccacgactaaacgttagaccttcggcgccgcctgctgaaccgctaactcaacaagtctccgaatgcaaagtttgttttgatagagaaaaatctgtgtgtttcatgccgtgccgtcacctggccgtgtgcacaacatgttcgcgtcggtgcaaacgttgttgtgtgtgcaacgcaaaaattattcaacgcatcgaaacattacctcagtaaacattgcaaacgactacgacattctttaaaaataagctatatataaatatcgcattgtatgacaaaaaaattattaacctactgcaaactaaaacttgtaaaaggcttttcaaaaaaatttgcgagtttattttgtcgctgcgtcgtgtcgcatctaagcgacgaagacgacagcgacggtgatcgctattatcagtataataacaattgtaatttcatatacataaatattgtaaaataaaagacatattattgtacataatgttttattgtaattaaattaatacaccaatttaaacacatgttgatgttgttgtgaataatttttaaatttttatttttttcgtcaaacactatggcgttgctttcgataagttttttagttagcatttcatctaaaaaatcaaactgtttgcccggcgcgtttagcgattctatggtgtagtcgggcgtgtcgttgtttagatattggtccacttcgcgcattatgtccaaaacgttattttgcaaatgaatgagttttgtcaccacgtccacagacgtgttcatgtttcttttttgaaaactaaattgcaacaattgtacgtgtccactatacaatttggcttaatatactcgtcgacgcaatcgtatttgcaatccaatttcgtgttcaacaaattggtgatgatgtctttgaaggtgcacgttttcaatttgttcttatcggccaacgcaaattttaattcgctttgtaaagtttctaaaattttatctttattgttgtcaaattcctgcgtgttgcgttccaaccacagtttgaacggctcgtcgacaaaaatgctgcgcaacacctcgtacaactgtctgcctaacgtgtacacttgctcgtattctttcatgctgacctctttgctaacgtacattactaaaaaatctaccagtattttcaaacatttgtaataggcgacgtattttgatttaagttttaaaccgtccaccgtgtattcgtccacgttcgcatcgactacttttcgattattatcgccgcttgcctcagcttgttcggttttaactatatccgattcaatatttaaaatttcaaaagatttaatggcattcataaaatcatctttttgcttttccgtagttaatggtaaatctatcgaggaattgtcatccgtgtgctcttcaagcacgctgttcaaacgtaacgtgatctttttgggatcgtcttcatcgggtatcaaatcggctttaattttattagaattgagaaacgacatggtggtcgcttgtaaatttaataaattaattaaagattgaaattgtatattgcacaaatttattttcatttttattgatcttactattaatacgctggcaattggtatgcttcatccatttttgtgactagaaaatttgctaaaaaactgagttcgtcctgtgttaaaacgttgtcgtccacaaatctatgcaatgtaaatgttacactgacgttgtttaacagtgcatgtattaaaaaatcaacttgtcgcctactgagtttattagaagagtcgaccgtttctactagtttgtagattttgttattttcaatttcattatttaaaaacatgttcacaactcgtttgagtttaagcgaaaaatccttgtccggatagacttgttcgcacagccaattgctaagagtggttttgaccacggacaccttggtggtaaacgtcgtcgatttaaccagttcggtaaaaaagtttttcattaaattggacattttaacaaacacttatcaatctattgagctggtatttttgtttagaatcgcatcaagcgcttgctcaatctccaatttttttcggacgctcttagctttatgactcggtatgtcttctacggtagactcggtgttcttacttataatggccgggctgacaataataaacactagaaacaatatgaggagatacaaaaagatgctgttttcctttttgtcatacactaggctaaatatggccagtgcgcccaacaacagatacaaattcatttttgctcccttactctattcgttgcgatagtacaacgacgattctcccgacgaaccggacgaattgcggttatgctgcgcgtcgtcgtcgtcgttgttgttgttttcctcttcgctgctcgtttcgtctaaacctatattgtatttgttcaaataatgtttggtgcttgcggaagattcgtggttcattaatttggccactttttgtaaaggcacgccgctattgtataggttgctgctcaaataatgtcttatcatgttgctgcgcggccgttccatctcgacgcccgactcttcaaggagtcgcctgaaatctttaaagggcgtcgaggtgtttttagatatttgcaaaatggtcgggtttcgtgaataaatctcgcgtgccaattccaacggtttcattttgatgttgttgagtgtgttattacgactgcgttttcgttttaaattaatcgtgtcgctgtgcagttttccccttttaattagcacgttaagatcgtccacgctgagttggcgcgcttcgttgattcgcatacctgttcctaacatgatgcaaaacactattgcgcccctaattagaccgcggtcgtgaacataatcgctgttgagcattttaattttatcattaataaaatttaatatggtgtctattacgtttttaagcattaaattcttttctttttccctaatattttttaactccttgtcgcgcggcagcataaccatgcgcggaattttgtattcgggcaagttcatcatgttagtgtaaaagtttatagtcaactgtagtgtttctttggtaactgagcgaagttcgagcatgcgtctgcacagttcttggggatcaatgagaagtttttggttttctattgaatcaaattccttgtccaacgagtatgacatgtcttccaagtgaacatcgtccaccgagcaatacacaattttaatgaatcgagacttgtaacttttcaaagtggtgggcgcaaacggtttgggaaacatgtacttgctccacaaactgttgtttttcacctcgtcgggcgtgcatcgttgtcgatcggtggccaaatcgaatacggactcgaaccggggagcggattgaatttttattttccaagaattaaaattgttttcgttgcgaacattaaaaccgttcattgtggattaatcaaatttattaaaaacaaaaggagaatcggtgtcaatactatccgaatattgttgttgttctcttaatattacaaaataatatattacatacagcaataaaaataaagctataaaagcgactacactaattaaaattataattcccgccgacacgttgctcgtcgtgttgtcatagccaaccatgtcgtttattggcattttgtgaacgggttcgctaaattgttgaggttcgctggcgatatcgtcgttgagcgccaattttaacgggatgtattccaccttttcgtggttgcccaatcgataatagggtacgtccaaattcatgtttacaacttatttgctaacaggaatttatgcaacaaaagtggtttggctttgatgagacgcaatttaaaatacttgctgcatttacgcttaagattgtattccatgcgggcggcggttttgtagtcgtacgcgctcgcgctgtgatacacaagttgtaaactttttgcgttgcgcaaacacttggcgccttgtttgttcgaatgctgttttatgcgtcttttaagattgcttgtaatgcccgtgtacaattttccattgtcttgccgcagaatgtacacgcaccacaccttgttggtgtacagagtcgtcgccatgattatgcggtgcgccctttcgtattcggccgagtggtgttaggcgtagccgcggcaataatcgcgttggcgtccttgttgtaatttatttgttgaaaaataaaacgtcttagagtttcgttttgaaacgccaattcggtcaagctctcctggcaagcgcttttggtcaaatgagcggccggcgaattgaccgcgttggcggccgacgttaaaaaggtggcgttctggaacatgctgggctgcttgccggctcgcgtcgccagctcggccatgtaattgaatatgttggccgacgcagatagcggcgccaaaaacgcaacgttctcttttaaactcatgactcgcgccctgtttttttcgttcagcacgtaatggtagtaatcgccgccgccggcaaatagatcgtcaatcacggcgttgatcagatcgttaatcatgttgatgtgcggaaagcgacgcgactcgactgcgctttgtatatttggcggcagagtggcgtgtttgagcaacagagtcatgtaattgttggccagctgctgattgaacggtaacggaatgggaatgttgcacgtcaccgcttccgccaccatatactggacggccagactgagttgtttggcggcctcggccaaagcgtctttgcctaacatatcggcgccgccgttgtaaaacttttgcgcgtacgccggcagcgaatttagcacaaacgatggctgaaatatatttgaatcgctcgacagggactcggccgcgttgctctgtcccaactctttttgcaaccgaatcaggtggcgtatcatggtttcctccgactcaaaccgctttaccacgtttacgctgattgggttcgtgtcgatgcacatgtcacgaatagtgtttataaaaagaatcatgagaggactaagttctgatatgtcattgcatctgtaatatctaataattttttgaacaaaatccacacatttgttgtaccaaatagattcgccagcgtcgagcgtcggttctttatttttgttgtacggtgcgatcgctaccgagtttgtactattgctgcggctcgtgtaatccatcctgttgtcgcgcgtggcgacggtcgtaggtaccgtcgccggcggcacgtacccgggcgcgttgtaagtttgcgcgctagtaaatatagccgttgccggattagagggatacctcagcggcggaggggtgttgtaataaaaattgccacgttcatctgtcatactttttatttgtactcttatgattacaaaactcaatatacggattacttataatataattgttgtgacaaaaaagcgatattaaaattaacaaaattatcaacaagttgatcatggaaaatttttcaacgttgaataacaacaacaaaatagcgcaggtcaacagtaccgtttgaaaactgacgcgccgacacaaaatgctttcgcaatttctaaaagccacattaaacgaattttcccctttgatataatcacgcagttcttttttacaacattcgtcgcacaaaattaacacctttataatgaggccgtcggtgtgtatcgtttgaaatgttcgcggttgactgcctggatgaaattcaaacgagtacccagtggacacgtgtatctctgcaaaataatgggccaatattgaggcgcccgtttttttaacctttacttttgatattttaataacattaatgttgttgtttgcgtaatcagagtttttgttgcggtggtcatcgtacaaataatgaagcaacagttcactatcgtatttaatcttgttcagcgttgtcaagtttttgtttcttaggcgttggagcgtctccgtcgtcaatattttcttcgaaatcgagtccaacagcgtcggcgtttccttcttgctcatcaatagcggcgacggaggcggcgtttccgtcgtcgtcattctcggtttctacagtgcgtttgggcgacggcgtgtgtacagcagcgtccgtcttactattatcggacggccaaatttttgtttgaaataacatttggcccttgtttaactttatttcggcgcagttaaacattattgcattaagatcatattcgccgttttgcaccaaattgcacaaaataccatagttgccgcacgacactgtagaataggcgtttttgtacaacaatctaagttgcggcgagctagccaccttgataatatgggcgccaacgccccgtttttttaagtaatattcgtcttcaattataaaatctagtacgttttcatctttactgttaatttgggcgttcacgatgatgtctggcgtaatgttgctcatgcttgccatttttctaataatagcgtttactttaatgtatttggcaatctattttgaatttgacgaaacgactttcaccaagcggctccaagtgatgactgaatatgtaaagcgcaccaacgcagacgaacccacacccgacgtaataggctacgtgtcggatattatgcaaaacacttatattgtaacgtggttcaacaccgtcgacctttccacttatcacgaaagcgtgcacgatgaccaaattgaaatttttgatttcttgaatcaaaaatttcaaattgttgatcgaatcgtacacgatcgcgttagagcaaatgataaaaatctcaacgagtttattttgagcggcgacaaagacgacgtgaccatgaaatgtcccgcatattttaactttgattacgcacaattaaaatgtgttcccgtgccgccgtgcgacaacaagtctgccggtctttatcccatggacgagcgtttactggacacgttggtgttgaaccaacacttggacaaagattattctagcaatatgcatttgtatcatcccacgttctatcttaggtgttttgcaaacggaacgcacgcagtcgaagaatgtccagacaattacacttttgacgcgaaaaccggccaatgtaaagttaacgaattgtgtgaaaacaggccagacggttatatattatcatactttccctctaatttgctcgttaatcagtttatgcaatgcgtaaacgggcgtcacgtggtaggcgaatgtcccgcaaataaaatatttgatcgcaacctaatgtcatgcgtggaggcgcatccgtgtgcgtttaacggcgccggacacacgtacataacggccgatatcggcgaaacgcaatatttcaaatgtttaaataataacgaatcacaactgataacgtgcatcaaccgaatcagaaactctgacaaccagtacgagtgttccggcgattccagatgcatagatttacccaacggtacgggccaacatgtattcaaacacgttgacgacgacatttcgtataacagtggccaattggtgtgcgataattttgaagttatttccgacatcgaatgcgatcaatcaaacgtgtttgaaaacacgctgtttatgggcaaatttagattaaacatgcaattcccaactgaagtgtttgacggcagcgcgtgcgtgttagccaccgcggacaatgtcaactttttacgttccacgtttgccattgaaaatattccaaaccattatggcatcgacatgcaaacctccatgttgggtacgaccgaaatggttaaacagttggtttccaaagatttgtcgctaaacaatgacgccatctttgctcaatggcttttgtatgcgagagacaaagacgccatcgggcttaacccgttcaccggcgagcccatcgactgttttggaaacaatttgtacgatgtgtttgacgctaaacgcgcaaacatttgtaacgattcgggaacgagcgttttaaaaacgctcaattttggcgatggcgagtttttaaacgtattgagcactacgctgaccggaaaagatgaggattatcgccaattttgtgctatatcctacgaaaacggccaaaaaatcgtagaaaacgaacattttcagcgacgtatattgacaaatatactacagtcggacgtttgtgccgacatatatactacactttaccaaaaatatactacactaaactctaaatatactacaactccgcttcaatataactatactctcgtaaaacggcctaaaaatatcgaaatatatggggtaaatacacgtttgaaaaacgctacgattccaaaaaacgctacaattattccgcccgtgtttaatccctttaaaaatcagccaaataacaagcaaaacaatcttattttacccctgtttaacccttttcaaacgaccgacggcgtatggtacagcgaaccaggcggcgacgacgaccattgggtagtggcgccgccaaccgtaccacctccaccgccagaaccagagccagagccagagcccgagcccgagccagaaccggagccagaacccgagccagaattaccgtcgccgctaatattagacaacaaagatttattttattcatgccactattcggttccgttttttaaactaaccagttgtcatgcggaaaatgacgtcattattgatgctttaaacgagttacgcaacaacgttaaagtggatgccgattgtgaatcggccaaagacctatcgcacgttttgaacgcgtacgcttatttgggcaacgagattggttgtagatccgcgtacgacggagatgcaatagtggtaaaaaaagaagccgtgcctagtcacgtgtacgccaacctgaacacgcaatccaacgacggcgtcaaatacaaccgttggttgcacgttaaaaacggccaatacatggcgtgtcccgaagaattgtacgataacgacaaatttaaatgtaacatagaatcggataaattatactatttggataatttacaagaagattccattgtcaaaaacaaatgacatcattccggatcatgatttacgcgtagaattttactcgtaaaacgagttcagttatgagccgtgtgcaaaacatgacatcagaaaaatgacatcatttacttatcatgatcatgttaataattatgtttaaaaatgacatcagttttaatgacattatttcttgatcgtgtgttacaagtagaattctactcaaaaagcgagttcagtttaaaaaacaaatgagtcattattaacatgttaataatcatgtataaaagaatttaataatgacatcatcctttaatcatgttttacgagcaaaattctactcgtaaagcgagttcattttttgaaaacaaatgacatcattttttaaataacatcatcttttaatcgtgtgttacaagtagaattctactcgtaaagcgagtttagttttaaaaaacaaatgacatcattttttgattgaaaaacaaatgacatcattttttgatttaggttacaagtagaattctattcgtaaagcgagttcggttttgaaaaacaaatgacatcatttaaaatgacatcatttcttgattgtgttttacacgtagaattctactggtaaagcgagtttagtttttaaataacaaatgacatcatctcttaatcatgttttacaagtagaattctactcgtaaagcgagtttaattttgattacaaattttgtgcataatattaaatataaatagcttaacaaaattaaattttttcatttacttgttatcatgtcccgaaaatactactcaactgtgcctgctcgtttaaagggcaacgttattcaagttcgttataaagatgtatcacatcttttgtcacattatttatcattgatgcctaacgttgaaatggtaaatgaatatggacctaatcaccaattaataaaaagcaaaaacaaaacgctaaaaagcttgcaagatttgtgtctggacaaaatagccgtttcgatcaaaaaaccttttcgtcagttaaaatcgttaaatgctgtttgtttgatgcgagacattatattttcgctgggtttaccaattatttttaatccggctttgctacaaagaaaagtgccgcagcgcagcgtgggatatttcatgaattcaaaattggaaaggtttgccaattgtgatcggggtcatgtcgttgaagagaaacaattgcagagtaatttgtatatagattatttttgtatgatttgtggtttaaatgtttttaaaataaaagaataacaatttacacattgttttattacatggataatgttgtttgtttgacattaaaggttatcatggtgcaatgattaataataaaacaatattatgacattattttcctgttattttacaatataaaatcacaccaattgtgcaaagttttattatttgtttgtcgacggtcgaggggtcagcggcgtgtgcaacaataaaaaacatgaagctgttaacaattttgattttattttattcattttttatgaatttgcaagcgctaccagattaccatcaagcaaataggtgtgtgttgctgggaactcgcattggatggaacgatgacaatagccaagatcccaacgtatattggaaatggtgttaaataaaagtgaatatattttttataaaattttttatttaaaattccaagtaatccctgcaaacattaaacactgtaggtatttttaaatcttgccacatgcgaacaacgcacggcctgtcgtcgaacaccgctattacattatattttcctctgatatagttgttaaacaattttaattttaataaataatctttacaagtatcgtctgaaagcctcataaacaatttatatgatttaatatcaaaatacttttcaatccagtttcgagtgggctgttcacaaattacgcttctcccgctcataaacacgataattgcgtcgtggcaatttgccaaatacttaacgcaagtaataacgtctaagcgggcttcatcttgagcaactctattatcaaaatcataaaacgatctatttgtgggcaaagctactgtaccgtctaaatcacataatacagcgcggggaaatttgtcgccgacaggaacgtaatattcgaaattatttacctttagaaactttttatattgctttttaatagtttctggatttaatggaaatttatcagagcgtttataattgcgttcaagagccgtttccaaagaaacgtccatcaaacgcgttaaaaaatggtaattatgcgttgcggccattttttgccacatgtccaccgattgagtgttcaaattagtgtcgctgacaaccacgttggcaccacattttgcggcttttaaaaactgttcaatgcacattttggtaatttgttcttctttagtttgtctacatttccgcgattggttatagaaagcgttcagttttgtataatcgccgtttaaaaacaacttgacgcgcacgtcgtctctgttgatttctgtatagccttttaaacttttggcatacgtgcttttgcccgaacccgaaatgcctatcaacaccaacaattgttttgaagaaggcaatttaattgttggagcaagtttattatttaatgcctgcttagtcgatacaaattttataatatttttgatcattttaattttttcaggctcggttaattttaaaaattcgctctccacatcgattgtttgtgctttacgacatctgtacgctaaacatttccacggcaaagtttgcaccagttcgttgaaacgctgttgattcaaagtcaaacccgacaccataatatttattgtagactcgttggtgaacgtgtttctagcatcaacgtacggtttaatgacactttttaaatgcgggaaaagagctagaaagtcatcgtgttcgccatttataacaagctgcgccaatttagtaggattttcagcacggctctgattcttgtgcatgttcaaatacacgtcgcttttaatcttgcatagcggcgcgttgtttttatcgtaaactacaaatccttcttccaaatttttcaactgggccgcgtgttcgacacattcttgcacagacgtaaactcgtaacatttggggtatttgcaaaacggcaaattggaacagtaaaaataatcgcccgtttcgttgtttctgcttgccaaataccacaacgttggctgttcatcgtaaacggttacaattctgttgtgtttgcttgttaactcaaacatgtgagtcgacgcgcagtctaaatattcgttacacaacgcttgaaattgattgtgggcctcgtcaagttgaagagcttgcaaaactaaacgtttaaacgtcacgtctgacacgcaaaggttttctgcaaaagcacttcctcgggtgctggcatgccattcgccgttgtacttgtagattttaattaaacttccgtcgattttttcgtaaaacttaaaattctccttcgattggaacagtttgtgatgagcatcttcgccgccgatattttgtagcaattcttgaaaattaaagaaacgatcgaaagaacgcgacacaacggcgtacgtgcggctgttaagaattaaaccgcgacattccacgaccacaggatgatctcgatcgcgttcaaacgattcgtaattaagaaccatcaaatcgtgttcggtataatttttaattttgactttaaacttgtcacaaagatttttcactccgccgtttgcaagtagacgcgaaacgtgcaacatgattgctgtttaataatgcataccaatgctaaactgtctattatataaagtgcagtgataactttgttatcaacgcgttcgatgccgacatatataaacgcaatgtaacagtttttgctagtaccatcgcatacaacattatgaatacaaggggttgtgttaataataataaaatgatatttatgaatgctttgggcttgcaacctcaaagtaaattgaaaattattgcacataaaatactagaaaaatgtaaacgtgacgcgtacacgcgtttcaagggcgtaaaggcgatcaagaatgaactaaaaacatacaatcttacgttgcaacaatacaacgaggcgctcaatcagtgcgctttaaacgatagccgatggcgcgacacaaataattggcatcacgatattgaagaaggtgtgaaaataaacaagagacatatatatagagttaattttaattctaaaacccaagaaattgaagaatattattacattaaagtagaatgttatgtaaacagttaattaatctacatttattgtaacatttgtggtaatagtggcgttggttatacatttatatgattgtaatgttgtgtactcgttttgtaataaatttttgtgtttaatcaattcaatatttttatttgataaaaccttattttcgctactcaatttggcgtttttagacgcaagttttgcgtaatcgtcattgagcgattttagcgccttttcagttgtaattcgtttcagttgcaattctttaaaagatttatgcatgttgttgtagtcgcttttaattttgtctaacttttcttgcatagaaacgcttgtttgttgtaatttgtctaaatctaattgttgtttaatgttgagctgcgtttgttcggcaatgtctacctgtagtttttttagtatcgcttgtgcttcagacagcatagtgtcgtcggcatttgcgttgttgtcttctgcgtcgtccaacagacttttttcaaacaacacactggccaaagaggccgcatcaaaattagcgtttattttattccattgtgcgacactcgacgcgctgcatttaatcacatccacaacgtttcggtttacgctgtaaacgttgaaatgcaaactttcaaccctacacaagggacatggtactttttttcgttttctaatcttgcgtatacacattgagcataattgatgtttgcacgtgtctagttctaatacgggtattatagtcaatctgtctattggttgcagaaaataatttttaatttctgcaaccgaaaaacaaatgttgcattgcaatttaacaaactccatttttagacggctattcctccacctgcttcgcctgcaacaccaggcgcaggacctgccactgcgccgccgcccagagtagcgttaggatttgctcttggtataaagtcgttgcgcaaaaagttgttttctgaattgattatttgatatcccaaaaatagcggaacgtacgtcgggtattcttcgtatccactaagcgttctgtctagctcacgtgtgtcgccttcaaatttcaaaacgtttctaatttgcaaacggttgggctgacttctcataatgtcactgcttcttatcgggttgtacaactcgacgccgtcgggcacagacgccaccaaacccgtttcgtcaattatacacgtggcgcaatttctaaacctcaattcctccgtgtcgatttgcaaatactcgggcgctactgcgcgtcgaattaaattttgcaaaaatccgctgtaattgttaaataattgatcgccagcaccgcctcgccgcgctcgggcgttggtcacgtcaaagaaacgcagttcgtcgcgcgacacccgcgaacaaaacgtgttcgggtttgtggtgtccagaatgctttttgtagttgagtacacgctgtgtataacgcgttgcgtgttacttgtaaaaccttcggtatattttagattgtcgcatatagcgttaactgcgttttcattgttatatatcaaatgaaagattagttgttcagcttgcatcatactgtttagattaaacacttcttggtaattgtttgcgcttggaattaaaattcgcttgatacccctttctttatttccaactaaatgcctagcaatcgtcattttgaattgattgtcgtcttcgtcgaaaataggcaaaaccatttttgacattttaaaacgttttatgaggtggttgttgcaaataaaccatccatcgtcatgatacgcgtcgggcgaacatggtgatttgtatgttatgcacgcgtcgaacgacacgatggacgcgaaaatgcagcggttaactctcatttgtcgcggcgccatacccacgggcactagcgccatattgttgccgttataaatatggattacggcgattttgtgattgagaaagaaatctcttattcaataaattttagccaagatttgttgtataaaattttaaattcttatattgttcctaattattcgctggcacaacaatatttcgatttgtacgacgaaaacggctttcgcactcgtatacctattcaaagcgcttgcaataacataatatcaagcgtaaaaaagactaattctaaacacaaaaaatttgtttattggcctaaaaataccaacgcgttgatgccgttggtgtggagagaaagcaaagaaatcaaactgccttacaaaaccctttcgaacaacttgagtaaaataattaaagtgtacgtttaccaacacgataaaattgaaatcaaatttgaacatgtgtatttttcaaaaagtgacattgatctatttgattccacgatggcaaacaagatatccaaactgctaactttgttggaaaatggggacgcttcagagacgttgcaaaactcgcaagtaggcagtgatgaaattttggcccgcatacgtctcgaatatgagtttgatgacgacgcgcctgatgacacgcagctaaacgtgatgtgcaacataatcgcggacatggaaacgttaaccgacgcgcaaaacatatcgccgttcgtgccgctgaccacgttgattgacaaaatggcccctcgaaaatttgaacgggaacaaaaaatagtgtatggcgacgacgcgttcgacgacgcgtctgtaaaaaaatgggcgttcaaattggacggtatgcggggcagaggtctgtttatgcgcaatttttgtattattcaaaccgacgatatgcaattctacaaaactaaaatggccaatctgtttgcgttaaacaacattgtggcctttcaatgcgaggttatggacaaacaaaagatttacattacagatttgctgcaagtgtttaaatacaaatacaacaatcgaacacagtacgaatgcggcgtaaatgcgtcatattctgtagatccggtgacggcgatcgaatgtataaactacatgaacaataacgtgcaaagcgttgcgttgaccgacacttaccccgccattgaattgcggtttcagcaattttttgatccgccgttacagcagagcaactacatgaccgtgtccgtggacgggtatgtcgtgctcgacaccgagttgcgatacgtcaaatataaatggatgccaacaaccgagttggagtatgacgccgtaaataagttgtttaacaccctcaatgggccattgaacggtctcatgattttaaccgatttgtcggagctactgcacgaaaacatttacgaatgtgtaatcacggacacgacaataaacgtgttgaaacatcgtcgcgaccgaatcgtgccaaattaaagcacgttaagcggatacaacgggcagtccgagctgttaaagtcaatacaaccatcgttaacaaacgaatacgcattgttgtgacagctgaggatataaaaaggaatagagaagtaattgcaatgaaatatcccgttacaattccacggcacagcgtatgttgctcgagttctatcagttgcacacaacggcctaagaaaatttattaatgcttcatttgtatctatattagaaggataatacataggttcgcccaaaggactgggagaaggcggcggcgaaggtgtaggtgtaggaggaataggagaaggcggcggcgaaggtgtaggtgtaggaggaataggagaaggcggcggcgaaggtgtaggtgtaggaggaataggagaaggtggaggtgtaggtgtaggtgttggaggtataggtgttggaggaggtgtaggtgtaggtgttggaggtataggtgttggaggaggtgtaggtgtaggtgttggaggtataggtgttggaggaggtgtaggcgaaggtggaggagaaggtgtaggagtaggtggaggtgtaggtaacggtacaattggtggagatgtaggtggtggtacaattggtggatttggatacaattcctgaatgtcgtctaatatttttaaagttaataaaattattataaataaatttaatattattattattattatcacaataatgtaccacatgttgcttaaatataaaaattaaacaaagaatgttgtattattgcaaatttaacaattttttgtattctccccatgtcatgcgttcgtaatgagcgggcggttttttatttctttgtatccacttgtaatcgttaatgtggttgtgaaaagtcatactgacgtaggccattaaatttttcatgagcatattatttgacacaactgcaacatctgcgcctgccgtttcttgctggtacgaatcgacaaacgtaatgtctgtgccgtatttttctttgtcaagtgcaatttctataagctcaatgtggtaaatgatgaaacctttgacgttcatataatgatcgcggcacatggcgcattgtaatataaaaaatacgttgtaaaatagcaccttcatcgtttttaactgctgcataacaaaatctaaactgcttttgtctcgcgtatacaccatatcgtcaatgatgagactaagaaaatgcatggtgtcccatatggtagtaaacgtgtaagtaaaactcttgggctggcacgaacgcaaattaagttctgtggttttgtccataaattctatgcgaaactgttgcaagtccatgtcgggagatgcgttaatagcccattcgatcaactgctgcacttcgtacttttgaatgtctttgtatttcatcaaacacgcaaaatggtataagtaagttgcttgcgaagacaacagtttagtgaggtgcgtcgatttagaggctcgcaaaaggtctatgagacgaaaagaatacaacagatagctatctttgtagcgagaaaaaagcggcgttagcggtatcatggcaactaacaaaacgatcgtcctgtacttgtgtcaggcgccggccacagcgtcgttgtacgttagcgcagacacggatgccgacgagcctattatttattttgaaaatattacagaatgtcttacggacgaccaatgcgacaagtttacttattttgctgaactcaaacaggagcaagccttatttatgaaaaaagtatacaaacacttggtacttaaaaacgaaggtgcttttaacaaaaaccacgtattgttcgatgcaatgattatgtataagacatatgtgcaattggtcgacgaatctgcgttcggaagcaacgttatcaactattgcgaacagtttattacggccatttttgaaatttttacgctcagcagcaaaatcgtcgtagccgtgcccgtcaattgggaaaacgataatttaagtgtacttttgaaacatttgcacaacctaaatctcattggaattgaaattgtaaattaaacaaatcatgtggggaatcgtgttacttatcgttttgctcattttgttttatctttattggacaaatgcattaaatcttaattccataaccgaatcgtcgcccagtttagggcagagcagtgattcggtggaattaaacgagaccaaacaattaaacgtaaagctgaataacggtcgggtggccaatttgcgcatagcacatggcgataataaattgagccaagtatatattgccgaaaaaccgctatctatagacgacatagtcaaagagggctcgaataaggtgggcactaacagcgtttttctgggtaccgtatacgattatggaattaaatcgccaaacgctgccagtacatctagtaatgtaaccatgacgcgcggtgccgcaaattttgatattaaagaattcaaatccatgtttattgtattcaagggtgtgacgcccactaaaactgtagaagacaatggcatgttgcgctttgaagtcgacaatatgattgtgtgtttgatcgaccccaacaccgcaccgttgtccgaacgagaggtgcgcgaattgcgcaaatctaattgcactttggtgtacacaagaaacgcggcagctcagcaaattttattggaaaataactttactgtaattaacgctgaacaaaccgcttatctcaaaaactataaatcatacagagaaatgaattaataaaacaaaaagtctatttattaatatattatttattaacatacaaaatttggtacactggtgttcaaatcatttctgttcaaagccattgtcatgttataaaatacatttgtagttttattgtagttatttttaaatttatttttaatttgctgtaataaaacttgttcattaaatacaaaagattttgaactacttgcgtttatattttttttataattgtactgaacaaacgaagggtgcaaaaagttttttaaatgctgaacggcaatacctatcatttcctccattttgtcctctcctattgtaatagtagcactgcgcaccgttttaatgtttagaatgtaaatgagcgcatacagcggactattgttggtgcttaaacacattagattgtgcttatgcatagggtcgttgctcagcagcgttttgtatactacaaagcccgttttggggtcgcgtctgtacattaatacgtgcgacaaaaacaaacgcactggcgtcacaagcgattcgtaatacatgctttctattggaaactgtttcgacttgatgtgttcgtacacggagccggcaaacttgacgctgtctacaaatttatgatttgtgtaaacaatcaaaaatctgtcttgtaccccgtcgtcataatcgtctacgtacagcggtttgttgttaacaattaacattttgtagtttgcttcatactttagcaacccttggtattttctactcttagaatcgctcttgctcgaatcggcgtgctttttaaagtacgactcgctgcactgttttaactcgttgatagtgtacaattgcgagttaagtttgctcacttctttgtcgctcgtttccttgttagattctccgctatggttgtcatcgtcaaacttgtgcatcaacaccaaatagtccaacagctcaaaaaacgacgatttgcccgaacccggttcgccgggcatgtaaatagccttttttccgtaatcgacgggaatagccaaactagcggcaaaatgcattaacataatcgcgttcgcgtgattaaaattggtgaagcgtttgaaatacaaatagccttcgacaatttttttcaaataattgtacgagtactctttcaagtccactttggatatgatgatgcgcatgtaaaaccgagtcagccacgtaggtaaatcgtccgtgctgcgcgccaatatgattttgtcccaccacacattgtattttttcaagataattagcgcgtcggtgtgatgcgtgtaaaatttgcaaatgttgtccgattcttcaaactgaacatctggttcgcgtgcaacatcatcgcgcaattcggttagaaacaaacgtttatcattaaacttgtccatcaacatgtcgacatattcaattttgtgaattgttcgatacaagtactgaataattttgttatgttctttagaaaaaaactctccgtgttggttaacaaattcgctgtttgtgcaaatcaacgtggtcgacacgtacgttttgttggtaaaaattagcatccaaatcaattcgctcaattctgcatcgttaccaaacatgtccgccatcaagcagacttttagcgcttttctattaatctttatttttttgtagcatttgcattttggtctagatcccgataccgttgaccgacacggtttgcattttaggttgtgcaacatgtcggaaactttgttcttgttcacgtacaaagcgagcgtaatcagattttcatcgtccaaattccataaatcacgaaacagattgttcaacgcgactcgcatatcggcttggcatgtattgcaattgcccatgtagttcactatggccgtgttagtttttagcatttttacatctcgacacattttggcgatgtgataagttctataaatactgagctcgtcggcgctagtagatagcatgtaattaaacgcgtcctcgggcaaatacttttcgtcggtgggctttttgaatgtttgcggcaacgtcgtgcccaacaaaaatggacaacttgaatgaaagctgttggtgaacacgttgtacacaccgtgcgttgtcaagtacaagtatttccaattgttaaattttatgttgctcaacttgtaacaattgcttttggtcaatttgaataagtcatcctctttttttacaatttgataatgtttgccgttaaaaaccaaattgactccggttactacgttttccaattttctaaaaaatcctttgcacacaatgtcaggtggcaaatttagcgccatcacattttcgtacgtgtacgcccacaattcatcgtgatccaaaacttcgtttttagccgattgagtaagatatatcatgtgatgtataccaaaataataacccaatgatacgcacaatttggtatcgtcaaagtcaaaccaatgattgcaagccctattaaacactattttgtcttgttttttgtaaggctcgcatctcttcagagcttcattcagagcttctttttcgcaggcaaataacgattcacacaaaagttccaagaacaatttgatatcggtttctctgtacgaaaaattttcgttcttggtcaatatcttccacagtacataaattaaaaaatcaaaatttttgaatctgcttttttcaaagtactgttgcagaaggtttggatcgttggctcgttcatgggtcgccaaaactttaaccatgttctcgtgaattgctataagccccaaattgatttgcgtttgaatgtaatctgcattttcgctgctcgccgatataatgggtataacgcgcggttttctggaacgcgtctcgtttaagtccacgtcgtttttgtcaaaattgttgttctcgaacactctgaggctcttaaggttaacgttgacgatatgcttgtactttggcaccgtgatgcattcctccaaattaatgtcgtctctaatgtaattgaaaaaatttttatctgaattgaccagctcgccattaactttgcacgtagccacagtgccgtcggccattttgagtataaacaagtcttcgtgagaatcgtcaaacttggtttttccatttacaaacagagtttgcggaggatcgtgatttgtgcgcaggctgagctcgacgttgaaaaaacatttggggtcaaacacgaacaagtccacagggcctagccttttgttgtgtatgattggtattgtggattcgatgacaattccaaattttatatttaaaaacagctgccatccgttaaaagagaaagcttgctctttgggccagttgggccaataatagtagtcgcccgcttgcacgcatttgttaatgtatccagggtcggtgctcttgaaaaaatcttcaaaattaatatacttttgtatgatgtcataatgctttttcaaaatgaaaggttttacaaaaatgcaaaaatcgttgctttccaacacccagtcgtggcagtctaatgtttgagctgcgtgtttctctgcaggttcttcggtgtcttcgcaagatgcacccatgtcgtgtttcgcgcacggaccgttaaagttgtttctaattgtgtttaagaactgttgaaagttgttgacgtactcaaacaatctacgtgttcccgttcgcgtgtttctaatgattaaatgatttgcatcttgcaaattgttaatctcgtacggtttgtcttgaggcacgttttttaaaaaaaattgtaaaatgttgtcaatcatgttgactatcttgtttgtacttttcgttttaatttatttaatagttgcaatcaaaaatcaccatccattcttacatagaatagaaacgctaatacaagatttcaacaacacattgttgtttggcgcgtatgtacagatttacgatctaagcacgcccgcccgcaccgaacgattgtttattattgcgcccgaaaatgtggtgttgtataattttaacaaaacgctctattattacttagactcggcgaacgtgttttgtcccaacgagtttagcgtgaccacgttcacgcaatccactattaaaacgatcaacgagacgggaatatatgccaccgcatgcacgccggtcagcagcttgacgctaattgaacattttgcaacattaaaaaataacgtgcccgatcacacgcttgttctcgatgtggtcgaccaacaaattcagttttcaatactcgacattatcaattatttgatttacaatggctatgtagatttgttggccgaataacgcgtatatagatgcttgtacgttaaaatcatacatttaatcgtccacaatgggtgaaaagtcactaaattttgcaacaaaaaacagcgataagaaaacagcaacaatgaatagagtttatatttttatttaataaaatattgttcgtaatccataatgttttgtattatttcattgtgataatgttcccaatcttgcacgggggtggggcatcgtttaactttgacgtaaaaatcgtacgcgtagttattagttggcagatcgtcgacaagtgtgatcgacttgaaaaagtttacatttttatcgctcaaatatttaatcacaatttttggcgatttgggtatattgttgtcggattgatgattgtgaatgtcaaaaacaaatttattttcaatgaaacgcttttttaaattgtaatctacaatagcgttgtgtgaattttgaattaaatcggagcgttctttttgaacggtggaaccttcgctgataatgatatcaaaatagccttctaaatcgacatctcgcatcgagtgtgctacatgatctctactgccatacgaccacaaaactaaaacgcaacccatttcgtgcaactcttgcaggctgtcatacacaaacggatctcgaatctcaacttgctcttcttcggttatgagagtgctatctaaatcaaacacgaccacgtgcggaaatccccacgttaaagattcgcttttgagagagaccactttgtagtgtggcaatagaaaccattctttaagaaacgaatacattggcggtttgttgctaagcacgcacatgtgacccaacactggcgttttgaatgcgcgtttaatattgtgcctgatatcgcgcatgtcgtcggcggacgctttgaatatttgcatacaataattgtaattgttttctatgattttacacagctgcgggtcattgcaaaattgaaatattacatattcaaaaaatttatatttttcaaagccaaggtatttgaggtcggcatactcgcttaaaacgagaacatgtcgtttgatgatggcgtcgttaaggcgcaaacagatccatttgctttgaagcgaggaagccataatgtacaaaaatggaccagttacgccttatttaaactgtttaaagagtttcgtataaacaaaaactactctaaactaatagatttcttaacagaaaattttcccaacaacgtcaaaaacaaaacgttcaacttttcgtctaccggccatttgtttcactcgttgcacgcgtacgtgcctagcgtcagcgatttggtgaaagagcgtaaacaaattcgcttgcaaacagaatatttggcaaagctgttcaacaacacaataaacgatttcaaactgtacactgaactgtacgagtttatcgaacggaccgaaggtgttgatttctgctgtccgtgccagctattgcacaaaagtttactcaacactaaaaattacgtggaaaacctaaattgtaaattgtttgatataaagccgcccaaatttaaaaaggaaccttttgacaacattctttacaagtattccctaaattacaaaagtttgttgttgaaaaaaaaggaaaaacataccagcaatgggagcacacgcaaaaagaaaatcaaacacaggcaaatattaaatgataaagttatatatttacaaaacagtaataaaaataaactatttgagcttaacgggcttagtttaaaatcttgcagacatgattttgtaacagtcgaaagtcaaacgagggcaggcgacgaaattgcttcgtttattcgctattgtcggctgtgtgggatgtctggttgttaatagtagcgtgttctgtaacttcggcgacctgtcgatgaacggctcctggatcttctgtatgtgcggggtctacccgggcggcgtctgtaacccgagcttctgcgcctgcgtgtcgaaccatatgtggtaccggttgaagaacggcgacggcgacgataaaccatgtttaaattgtgtaatttatgtagctgtaatttttaccttattaatattttttacgctttgcattcgacgactgaactcccaaatatatgtttaactcgtcttggtcgtttgaatttttgttgctgtgtttcctaatattttccattaccttaaatatgttattataatcctcaatgttaaacttgcaatttgacacggcatagttttccatagtcgtgtaaaacatggtattggctgcattgtaatacatccgactgagcgggtacggatctatgtgtttgagcagcctgtttaaaaactctgcatcgtcgcaaaacggaatttcggtaccgctgttgatgtattgttgcggctgcaacatttgtatcttttcgccgcgctcaatcaacaattcttcaagagtagtgcgtttgtcgcgctgtaaagccacgttttgtaacagcactattttcgcgtatctcataattggactgttgaaacaacgtgcaaacgacgaccgcataatatcgacggtcgtcaagtcaattgtggtcgaaggcatttccaacagagatcgtacggcgtccaacagcgtgtccgtttgaacctgcgtcatttgcggtctgcacgtgtagtcatcaaacgtggtttcgagcagtttaaacaacgaatggtacttttccgatcgcagcaaaaatatcatggtcatgacgacgtcgctaattttgtattctgtagaactggtgctgttcaacgaatagtgatggattagtttgcgagccgcatttctgtatcggcgcatgttgatcaattcttcggaaggctgcgcgggcgcggcggcgttggctcgggcaaacaaattaattacgggacgcggtgtaggctgcgcggacgttggcgcggcggcgaggtccgcgtttcccgccgcgtactgagacgctatggcagcgttgttatttaaaattgtgttttgcgatttgcgagccacgtgcatcataaaatttattaacacgtcggtgttcaactgcacgctttgatgttcgtcgcaaagcaaaggaaatagctggggccatatcgccaattgcataggctcgtctatttttaaccgcaatttgtttatttccaaatacaacgcgatagcgctcatcgtgaccgacgaccacacttactctgtaactatcacttgaatcgtgttgtcgtatacgtttcccaaaaaatctaacacgttgaccgtttcgattctatttaacttaattgtggacgcgttggcttgcattggttccagcagactgcgcgctccgacagattgagtagacaaaatttttaaactttccgtcttattgggcgtaatgtcgttaattaacaacgacgcagccgtttgagaggccgcggtgttgatggtttgcaacatatcgacggctgctatttgcgtttgcgccgaaggtcttgccggcggcctgttgcggcggtttctttgtgtttgcgacatgttgtcagtgtccatattggtatcatttattgaagcaatcatggttgagttcgataagtaaagatatttcgttgtctaattggtacttggtaatgatgtgccttataaatgtttcgggcacaatcatttctgtcattagaacgttacaaatatcaattttaatcaatttcaatttatgaattaacaaattaatgttttcgtccgagtacttgctcatgatgaaacggcaaacgttgcggagttctaactccgccactggatacgctttgttgggcaaactctctaaatagtgtctcaaataaaagccgatcaatacggtggacgctattttgttaacctttttcattttagtattgcggcccatttctatcatgaagtttttaaacggtagcaacagcctgtctccgttagcaacagtggagcagccgttgcattgcgcgctcaaaatactcaacacgcgctcgtgatcctcttggcgcaatccgacggttgcttttttgcattctttgacaaatggcacgcacatgtcgcgttttgtgtacaaagaatacgctttgtcgcaaatcaagttatagaaaaattgcacaaatatttgcgtaatcaagttgttttcgttaataatgtcactttcgtttttgtaatcggttcgaagcaacacgtataaaatcaaaggcatgccgaacataggtcttaaaaaaatgtcccaaccattttgcaagcccacgtcgagggtgctcaacgagcacgccaagtatttgcatttgcactcaaaacattgaattttgtttgcgggtctgcacgactggcacatgatcgcatccacgtcgggtgccggcgtgggattgtaatatttttgcaagtattgcataattgttctaaagtggggtacttgtttgataaactcgtcccgcaaaaatatcgaaaaaatgttttttacattgtgtatgttgtctgtgttgttggcttgattctcaaaactattttttatggaaacaatacatttgttaaattctgtgaaaaaagtaagacctttactgtttacgatcaagctttggttaaaatattttgaaaataaaaaacacaacgaatcgatttcatcttgtaacaattgcgcttcaaaacacacgttttcaaagcggtcgtaaatgttaaaccttaaactgtattgtaatctgtaagcgcacatggtgcattcgatataccccttataatatgaacgattccaattctctgttaattacgcgtttggcagcgcaaatactgtccagaaacatacaatcggtggatgcgattgttgacgacaaaacgctcagtttagaagaaaaaatagacatgttaaccagcatggtgttggctataaatagtccgctgcaatcgccgccgcgaataacatccagcgacctggccgcatcgattattaaaaataacagcaaaatggtgggcaacgattttgaaatgcgatacaacgtgttgcgtatggccgttgtttttgttaagcgttatcccaagtattacaacgagacgaccgccggtttagttgccgaaatagaaaataatctgttgcaatatcaaaattatgtaaaccaaggcaattatcagaacattgagggttacgatagtttattaaataaggcggaagagtgttatgttaaaattgatagactttttaaagaaagcattaaaaaaatcatggacgacacggaagcgttcgaaagagaacaagaagcggaaagattgagggccgaacaaactgccgcaaacgctcttttggaaaggcgagcacagacgtccgcagacgatgtcgttaatcgtgccgacgccaatattcctacggcatttagcgatccgcttccaggccccagcgcgccgcggtacatgtacgaaagttcagaatcagacacgtacatggaaaccgcgcgccgtaccgccgaacattacaccgatcaggacaaagattacaacgcggcgtacactgccgacgagtacaattccctggtcaaaacggttcttttgcgtttaatcgaaaaggcgctggccactctaaaaaaacggttgcacataacaaccattgatcaattgaaaaagtttagagattatttgaatagcgatgctaatgctgaaaattttcaaatatttttaaaccaggaagattgtgtgatactaaaaaatttgtcaaatttagcgtcaaagttttttaacgttcgttgcgtggccgacacgttagaggtaatgttagaagcgcttcgcaataatattgagttggtgcagtccgaaagcgacgccgtacggcgaatagtcattaaaatgacgcaagaaattaaagattcgagcacgccgctttacaacattgccatgtacaaaagcgattatgacgccataaaaaacgaaaacgttaaaaccttgtttgacttgtacaacgacagactgccaatcaatttcttggacatgtccgcaaccagtccagttcgcaaaacttccggcaagagatctgcggaagacgacttgttgccgactcgcagcagcaaacgggccaatagacccgaaattaatgtaatatcgtcagaagacgagcaggaagacgatggcgttgaagatgtcgatgtcgattacgaaaaagaaagtaaacgcagaaaattagaagacgaagattttctcaaattaaaagcattagaatttagcaaagacattgtcaacgaaaagcttcaaaaaattattgtggtcaccgacggtatgaaacggctgtacgaatactgcaactgcaaaaattctttagaaattttaccgagtgccgctaactatggcagtttgcttaaaaggctgaacctgtacaatttggatcatattgaaatgaatgtaaatttttacgaattgctgtttccattgacactgtacaatgacaatgataacagtgacaaaacgctttctcatcaattggtaaattacatatttttggccagtaactattttcaaaactgcgctaaaaatttcaactatatgcgcgaaacttttaacgtgtttggcccgttcaaacaaatcgactttatggtcatgtttgttataaaatttaactttttatgcgacatgcgtaattttgccaaattaatcgacgagctagtgcccaacaaacagcctaatatgagaattcacagcgtgttggtcatgcgggataaaattgttaaactagcttttagtaatttacaatttcaaaccttttcaaagaaagacaagtcgcgcaacacaaaacatttgcaaagactaataatgttgatgaacgcaaactataatgttatataataaaaaaattataaaatattttaatatttattcacatttagtacatttacacatattaacatattgtttatacaaatttttataatcattatgatttaaattgaaatgctgtctaaacaaattaaacactttattaaacaaaaatttttcgttgtcattttttacttcgcacatgttataacaaaaaattaaaattttcatcatgtctgatttgtctatggcgtcacagttgtttttaatgtaatcgcaagttaaccactcaaaaggacccttttctatttttaatttgtttaaatctttgtaatcaaatttcagtttgtaaattaaatttccacttcgaatgataaatccttccaactggctttggggaaacatcaaagacttgaaatttaatttttctacaaagtcgttgtacaaatatttgtgacacggaatagtattaaaccccgcgttagtcaacaactcttgcgcctccacaaagggcacaaactgcccgccgtataattgaatttcgtaagcgtaatattttaaactctctttttggtccacgtaatcaattacattaatgggtgtcgtttttgcgtcgtctttccaacccactaattcgccgtagacaataaaaccgtcattgaaccgcgcccgaagcgatcgcatgcacgtttctaaatcttttcgaatgcgataataattcataaaattgccgtccggtctgtacgtgtttcttgacccgtacgtaattttattttggttgcaaatgattctgaaattacaaccgtccaatttttcttgaacaataatctctttgtcggccagcgtaccttttttaccttgatctagatgcgatacagatggataaatttgatacacaattttattctcatcttcgggcattacgggtccacgttcatttaacgcgtacatgacaatgttgtgtcgaatgtcggagcgctccggcgcttctggcacgtgttgcagtctgtcctgcaattgttttttccattgttggaaatattcggtccattcttgttgatactcgccgcgttgcataagttttacgtacaattttaaaagtttgacattttttacaaataacgttagagtttcgttaattttgtatcctccattatttttgtttaaatccaatacatgtaattcgttcactaccagttggttgtttttatccatcgtaatttttatctcatcgcccacgttaaacagcatgtttaaaattttggtggattttggcgcacgtttataatctaaataatattcaacgtacacgtaattaaacatgagctgcaacaatcctttggcattgttcaaaattttgtatctcatcaaaatattaataattttcaccatcgacactgtcatcaacttggttacaaactcgtacaattgcgagtttttaatgccatatttgtctttaaaatcttcacgtttactaaacatgcccaattcgggagattttccagttaaaatgccaattaatcccgtgtacaaatcaacgtatttgacatcgttgcccgattcatcttttgcatgtcgatttttcaaaagctctttattgtcgataaatttttcaaaagtctctcgatcacatttggtgtaaatatggtagtcagtgtcactgctttcaaccgcgtatcccttggcatgactgcccgtatcaatgcaaatgtacaccatgttagcaatgttgcttattgtgcctgtatcaagccttatatacctcaaaatattcatatttttgcatcatcgtaaaatatacatgcatataatcgtgtgcaaaatatgactcatcaattgatcgtgcgttacaagtagaattctacgcgtaaagcgagttcaaaaattgtgatgtcaatgaaacaacgtgtaatattttttacaatatttaagtgaaacattatgacttccaacaattttgtggatgtagatacgtttgcaagacaattgattacagataaatgtagcgctctaatcaaaagtgcggatttgttgccagcaaacattttagagattgtagagaaagccagagacaaatattttgaagagccaactcaaaaaaactatgaatatattaaaaaattatttttacgaacaaaatacatggacgattcgatagattataaagattttaacagacgcatcctattgatagtttttaaattcgctttaaacaagagcactaactactttccatcatacaaagaaatcatagaagtggccattaaacgtttaaacaaaattaatcccgatttaaaaagttctccgcgagcaatgcttcaacattacaatgaatgtttggaaaatctagacaatccagttacggacgaacatcatttattaacatttggaaaagaagttgctacaaaaatatttatcgaagcgtttgaatacagttacaccaacactaatgccatcagcatggataaaacagatgaatttgatttcattaaaccggcattaaaacctttgccagatgcaaaaccaccatcgcttttggccaacgtaatgaacgaacgtaaaagaaaattacaaaacgccaactcaactgcaaaatgtttgctaccagcaccaccaccattaccacaaccgcgtaaacttgaaaaaaagaatcatttattgcctttgttttctttgtaattattttgttgcatttctatttctaatatcatagttttctaataaagtagtttcatatttttgtttttgtacagtaattgtttcttggtttaacaaaatcacaaccaataacataaaaaataacacaatcataacaaaaattaaaaagccgcatattactaaaacaaattctttaattagcgatcggtttctatttacaaattggccgagctgatcgccttcagttggcgagttgttggcttgaataatgtcgacaatattgttgccgacgcgaccacccgtcgctctcgatatgatgtcggctgccgtcggtttcatgatgtgcttaactacaaataataattgtacttgacgggcgtaaccgtgataccgctgctaaaacctccctccgttaagacgcgttgcgttacaaaattaatgtttgtccgattagcgtagtcggaataatcaaacgtgttgggcggactaaaatcgggcatgttgatgggcacaatgccgctagagctgatagcaatgctgtcgttcttgcaaaacagccgaatttttttgtaaggttctgctttattgggcgcagacaacaccatctggtcaaagttgttcaattttatgattacgttgggtaccagttgatagggaaaaattattttttgaaacattttgacaaagtctacaaccgtttggctatagtcgggaatgccgagcaaagactgcgcctgtttaatgtatttaagactggagcggtttattgtagcgcaattggatggcacatcgcccttcataagccggcgcgttctttcccaatttaatttgttgtacaaattatcaatttcctcgtgcggcagattgattacatagcgtgcgggctgtttgcgatattgaaagatgcaaaaaatacgtttcaatgacaatatctttaccatagtggatgtttctagattgaaacacaacaaaaagtcattgctttccaccaattctttaaaatgagacagcggaatttcacaagcgatcggtcgcaaattactttttattggaggcggaacgctgtgaccgttgcggttttttagtaacgcgctgcacgcagattgcatgtcagtttcaggatacgtaaactcgatcggacatttggggttttcatggtggacgatcatagtgttgcaataaaacaagttgttggtcagaagcacgctaaaaacgcgcgtctcgcccgcaccgatttcggtgatgggcaccaacgggttccagtacactatggtggcggacgctgttttttttggtgatcgactgtctatgttaacatcatgttcgtgtctgtacactagcacagaattgaattttggaaattgttttttgtcaatgtacaatcgatcgtcgtctgtgggcacgtacacgatcaaattttcaattaatttattgcctacgtcgctttgcggttctaccaaattatgagggaacgcaaaaaaacgatcgctaatacaaacttgaatctgaaacgggcactccatcgtgatgtatatgtcttacttcattagactttagattattttaatttgcgaactcgtaccgtattcaacagggtgtcgggcacgtaattgtaatggtaaaacaaatcctgttgaacacgcgcgttgtttactacaattgaaatgcaaaaatacatcaggtacataaacactatgattagaaatgtagcagacagaaaatatttcatctttaaatcttatgctagttaaataaaatacatagtacttttataggtttatttatatttgttttctttgttataatcgttactgtaaaacttgtagtcgtgatcgccaggcataatttctctgcacatcagcttgcgaatatatgtaacatcttcgtataccgattttttaatgttaccatcgtgaagcgttgtcggcttgagaggtttgcggttgttgttgtaaaaattttgcattgaataattatccatagtgcagcacaagcaatgtcactgatgcatatgttttaattttttattgcattcaattattatatgattcaataaacgtacacagtaacacgtttattggttaaagataattttcaatatataaaagcgtttgaattgcgagaccgtcaacattttattaacgcgatgattaaacgacaattcgctttgctgtttgtgtggcatcacgacaaccaatttgtgtgcaacacaaacgaatacccgttttggcacaatattgaataccatgcacggcgctataaatgcatcgttttgtattgtgtggaaaatgacggatcgctacaactgcccgtttgcaaaaacataaatctcataaattataaaaaagcgtatcctcattattataaaaactctgttgacagtataatgaaacgtgctggcaaaattgattatataaaagtaactgcaatgttaaacccacacctgttggacgtcgcgtacaattatttgctgttgatggacatggattgtgtggtgcaaagcgtgcaatggaaacaattgtcaaccgacacgtattgttatgagccgttttacgactctcaaattaaatggttgtacgcgtccaaaagcgggcaaagttttgatagttatcttgaaaactatgcaactttaattcgagtcaaacaaggaaaagaattaatactgcattgtgtggattttcttacaatgaaagcaaatgataattttatggtgttcaaaaattatattaacatgattataaaagtgtatttgcaattttacaattacagatttcccatcaattttgaaaacaatacaatgaaaccttgtgtaaatttaacttttaaacgtggcggtagttggaaaactcaactgcaacccgtatgcaattatgtttacaaaagtaaaaatatgccaaaatttattaaataaaacaattaatttaaacgagcgtttttatttataatacgtacatatgatgtcattcgttttttcaaaatcaaactcgctttacgggtagaattctacttgtaaaacacaatcaaaagatatatcatttttttgtatgtgattataaaacatgtttaaacatagtacattaaacttaattttgcgagttgataaacatgattaatatatgattcatgtgtttgtgcaaaaaatgatgtcattttacaactcgctttacgagtagaattctacttgtaacacacgatcaaaagatgacatcatttgtttttcaaaaccgaactcgctttacgagtagaattctacttgtaacacacgatcaaaagatgatgtcatttaaaaaaaatgatgtcaccgtacaaactcattttacgagtagaattttactcgtaaaacacaatcaaagcacttcgtagttgtatcgaaaattgttcaagggctctttgttaatgtcgtaattgattaatatgtcgtacaatttggcggcgttgtgtttgcacacgaccgtttttagttcttgaaacattttttcgtgtatgtttaacatgttatatttcaaagttcgatgtgtaatgctggtgacgagcatcaaaataataaaatctagagcggctaatttgtaatcccgttgatacgctctgtaatcgccaacgactctgtgaccagatctttttaaattctgacaggcgttatggtacgaattgataatatttactatagtttctcttgttatcggtttgtcaattaaactgttaacaaacatcacgttgcccaagcgcgacggtttagacactgacttgttttttgtctgttcaaatttatacaaattaaaaacactcatagactgatcgtcaggcagtgtgtcgttatacaaacaaaatggtagaacgtttaattcgacaaacgacgagcaaattagagtttgttggctgttaacgtcctggggatgtaaactgttattcataacgtaacacacttcaatgtcggaatgcttgttttcaaatttgtccttgtctacaatttcgatggtgattgagcgaggtttgagtttattttgtaaattcaattggatattgtcaatatggtataccaccgatacgttgtgagccagcgatccttgattggttttaatcatatttagaatattcataatatggttaaaaaaagagtctgtcaaaacgtttgtgtcgttgttattaaatattgttttccagggtttactattgcgtgactctacgacggccgtgtaacataacaagcgcgccaattgcatgtgcgacaacttgatattatcaatgtcggcgatgtttggcaccagattttcattgccgtcttccagaagcgtgctcagttcggtcgagtagttgttcaacgatcgattgtgcgattcaaacaagtttactatcgcaggttgtacaaaattttttatgtcgtcaaattgaattatatcgatcttgtccttgttctccagcataaacgacaaattttttaggtcgaatttaatatttggcgtgttttcgttggactttttataatttaacaacatcgccaacagtttgtgtaattcgccattcgcttgatctttactaaacagtttattagtagcgtaatttacgttgtcgttcaaaaacagcaactcgctgatgatcattttttgtaaaagcgcgtacttgctcatgttgacagaatctcttacatttcagttgtagacgcgtctgtacaaattggccatgcgatttggaatgcacacgggaattgtgcgggccagtgccgtttggcgaaatagcattttttcatagccgctcgaacattcgcacgcgtccggcgaaaattgcaccgtgttcaaattcataatcaaccggccgtcattgcatagataaggcctcggtgttcccgtatcgtccaccaagtctctgtacgtgctcacgcatgtttgagacacgacaaaatctccgccagcggagaaaacgtgaaccaagcccagtctgggatcgcattctatcaagtcggggacctgcgcgtttaccaaagcgtcggaggcgttgcaaaagccatcctggcaggtcaactcgtttgcagcgctggaaattacgcagttgtctctacactgctgatccgtcacgcacggtaaccggttcaatgaacaatctatgcctcgattgcgctgaaacgtaaaatttaacggcggcgcttccaactcgttgatgtgcatgtatgcatcttgcaaaataaaattttgaacaaatttaaacgtgtacatgtacacgattaatataattaccagtaaaataagtatttgccaaacgttcaacatgatcgtcttaactgagtgtgaaaagcatgctgtgacgcacgaaatgactggttgcgcaaaaaataaatcggggtgtatataacttggcgtcgaccgcgttcatttttaccgtcatgcatctgacggctaatgtattgctcgtttctaacgcgctcaaaaagcaggacatgaaatacatttataatacgtatttaaaaaattacagtgtaattgaaggtgtgatgtgttgcaatggcgattgtttggccgtagtggtattggaccgaaatcagctgcaaaacacggacatggaagtgttggaaagtttagaatacactagtgacaacgttgaactgttatgcgaaaaaatatgtgtgatagttgataattacgacaaatattaccaaaaagtataaataaaataccaaattgttattatatattttgttttatttaataattaaagaatataacaccacatctattcctaatacaacaaatagtttaattattatttttgagtgaacattaaaaaataacaaacgatgtaaaaatattacagaataatacaatacataaatattatagtaaatagctgcaattttaatagcgtaatttatactttgatatttttcaacgtacaacgttaaatattgatacgcattattcacaaataacaaaatttttctaatatgccatttgtccgcaattgttttggcgatatcaaaacctttttcaaacaattgaaaaattacaaacaaaaccacgtacatgatgttatacattgtcttaaagtttttatatagcaattctataatgaagaaaattgctaaacacggcataaacgcgcacataatcgcgttgaccgcaaatatctcgtacgtacaaaaatactcggacattctccaataagtaaaatgcattttgctattatactgttgtttcttctagtaattattgcaatagtgtacacgtatgtagatttgatagatgtgcaccatgaagaagtgcgttatcctattacggtatttgacaatgcacgcgcgccgcttatcgaaccaccgtccgaaatagtaatcgaaggcaattcacacgaatgtcacaaaactttgacgccgtgctttacacacggcgactgcgatctgtgtcgcgaaggattagccaattgccagttgtttgacgaagatacaatagtcaagatgcgtggcgatgacggccaagaaaacgagacgcttattcgagcgggagaagcgtactgcttggctttggatcgagaacgcgcccgatcgtgtaaccccaacacgggcgtgtggttgttggccgaaactgaaactggttttgctcttttgtgcaactgcttacggcctggacttgttacgcagcttaacatgtacgaagactgcaacgtgcccgtcggttgtgcgcctcacggccgtatcgacaatatcaacagcgcttcgatccggtgcgtgtgcgacgacgggtacgtgagcgactataacgccgacaccgaaactccgtattgccggccgcggaccgtgcgcgacgtaatgtacgacgaaagtttttttccgcgcgcgccatgcgcagacggacaagttcgtgtggatcatccagcgctcaatgatttttaccgcaggcactttagattcgaagacatttgcgtgatcgacccttgctcggtagacccaattagcggacaacgcacatcgggacgcttatttcaccaaccaattgtaaatggtgtcggaatcaacggatgcaattgtccggtcgacgacgggttactgcccgtgtttaatcgacacaccgccgacactggcatggttagacaaagcgaccgcaccgtggcaaacgcttgcttgcagcctttcaacgtgcacatgttatcgttgcgccatgtggattacaaatttttctggggtcgcagcgaccacaccgaatttgccgacgcagacatggtatttcaagccaatgtcaaccaacttagtcatgaacggtatcgagcaattttgtaccccttgctcgagtcgcacccagacgtaacagaaattacaacagtcggcacgggtgttatgaaaatttccgtgtcgtacgataccacattgaaaaatatattattaccatcttctgtttttaggctatttagatttaaagaaaacggcactactcagccggtatgcttctttccgggcgtaggacggtgcataaccgtcaattccgattcctgcatcaggcgacacgctggcgctcaggtgtggaccgcagaaacgttcaccaactcgtggtgtgtactgagtcgtgagggtacgcatataaaaatttggagtcgcgcgtctcgatatccacgcggagacgcacctgcagcgttaagattgcgtggtttttttctgaacaacgatcgcgaacgaaacacaataagagcagttactacaggcgatatgacccaagggcaacaaatagacgcattaacccaaatacttgaaacttatcccaactattctgtataacaacatgagcattttaaaagttgtagaagcgtgcgatttggcgaacacttttttaaaattaggttatttatttagggccaagacttgtttggatattgctttagaaaatttggaactattgcgtcaaaaaactaatataaaggaagtggcagtcatgttaagcaagaaaactacagagtgtttgcaattaaaacgaaaaatagataaaaaaattgcacaacgtgttttaataaaaatttataacattaaatgatgacatcaataataacgggttcaatattttgtgtgcaaaaataaatgacatcatatcttgttttacgcgtacaattctactggtaaaacaagttgagatgatgtcatcattacaaatatatcgtatgtaataaaagaacataattgtgtgtaaatataatttattacaaataaattttacattgaatcaatctgtcttcgtgtttgttgtaaggtcttcgaattttgtgtttcaacccctcgggatggtcaaaatgcgccgtagtaattttcaatggatcttttaatgattttttgcccatggcgagtgtgacaaacgcggccacgacaaacagcaggataatcagtttcatggcgttctatatttgacaatatatgggtcgtttctaaatcgccttgtccccaaaagcttcttttatagttttttagaacacgttgtgtattccaacagtaattgttccatctctttcaacagccatgcggcgtccggtcgttgactgtaatcatgctgaattaatttacaaacaattttggtcaatttaggatggtctcgagataaatttgatggcatttggtgtacattatttctaaagttagttaaagcagtttcgcgttccaaagcagtcttaaaaggcattatcaattcgaataaaacaacacccaagctatacatgtcatttttgggggtgtacacttttttgatttgttctggtgctgcgtacaaagttgccttttgaggattgtttctgataaacgttttgtacagagtgccaaacatgccgcccacatacaaattaaagtcgggcccagtcatgaaaatatctttgggattaatattgtggtgcacgatatttacggaatgaattgctttcacagcgctcaccagatcaacaaacttgctaatataaaagccaaaatctgccggaactttaatattggtctttgtaaaagtttgcaaattgcgttgtttcaaatagtcgctcaacatgtactcgtttagtggcgacgcaaaatatatgcggtgctgccgcggattcaaatataccaattgttcgggtttcatggtatacaattaagtgttaacgcgtcactaaatcagacacgagcgcacgccctatatacatacaatttatcgcacaagatgcttaacgcgatctgtttataaactaaaacgcgttgcaataaattttagcaagcatttgtatttaatcaatcgagccgtgcacagatataagaattaaaaatgggtttgtttgcgtgttgcacaaaatacacaaggttgtcgaccgacacaaaaatgaagtttccctatgttgcgttgtcgtacattaacgtgacactgtgcacctacaccgccatgttggtaggatacatggtaacatacaacgaattcaacgacttgaaatatttacaatactggttgctgttgtcgtttttgatgtccgtggtgctaaacgctccgactctgtggacgatgctcaaaaccacagaagcccatgaagtaatttatgaaatgaagctgttccacgccatgtattttagtaacgtgctgttgaattatgtggtgtttttggacaatcaaatggctacaaattttgtttttgttaacaatttaattcattgttgtgtactttttatgatatttgtagaattgcttattttgttgggccacacaatgggcatgtacacggattatcaatatgttaaatcttgttatatggttatattgtttgtttcagttatgagtgttactattattatgggtttagagtgtttgaaaacgaaactaattgataacagtttgatgtttaacgcgtttgtttgcgctttatacattgtgattgcaataatgtggtctttaaaaaataaattgactagttattacgtttcaaatttacaaagtattcaagttgttccgttttcatacaacgatccgccaccaccgttctctaacattgtaatggatgacataaaaaataaaaaataatttataaaaaaatttttttattccttcacaattctgtaaattttaaacaaaaaatataaatacaaatttattatattgtcgtctaaatgaacatcaatttgtaaatctggacacctattcatatcattgatattacaatctgttatacaacaattaatattaaccaaattatctttacaacaattaaagcaattaaaacaatttaaataatcttcattgtcgtcgtataattttatttgcactatagacggtgtcacacagcgatccattcgacgttcatgttcgattaactttctcgccaacttgtaccataaaaattgtttggacaaaaagttttccaacgatggtaacggccaattcaacgtagcgatgcgcacgtcctcgggtatgcatttgttaaaaaacgcacaactcgcttttccaaacgaaagcaaaggtattaaatacggcactattggttgatttgttattccaagataattacaaataaacgaatccgtcgtggggtgataattggcaggtgtcagctttaaatagttttcaacgttattgttgcgcaaaagtctgaattttacacgtgttgttaatcccacaacttttgcatgtaaaattggatccaaatactgtagaatcgtgtctataatttctaatggtaaacgtatgcgttttgctcgtgcgcgctttgtaacgctcgacatcctaataacaactaacagaaaagtaaaatgatactcaatatatggcttttacagttcatctttaggtttaaattgggcgttcatcgcgttgagcaagtcgccgttatcggcatcaatctcccaagcaaacaggccgcccaaattatttcgatcgacatatttaacttttcctaacacagagtcgacgctgtcaaacgaaattaaatcacctttacttttatcaaaaacgtatgacgcttgagcggcgttgtcaaacgtgtacacataattgttgagatctttttgaatttgacgataatctacaacaccgtcctcccacgtgcccgacaccggcccgttaccagtgcccgaaaaatagttgtcatttgtataatttgttacgccggtccagccgcggccgtacatggcgacgcccacaattattttgttgggatcgacgccttgtttcagtaacgcatcgacagcgtgatgtgtagtgtatagttctttggagttccaacttggcgcgtaaactgttgtttggtagcccaaatccgtgtttgaccaagcccctttaaaatcgtaactcatgagaaatattttgcctaatgacttttgcgcttcgtcgtagtttaccacggcaattttgtcgtaacccgcgcttatggcgcttgttaattcgtaaaccctgccggtttgcgattcgagatcgtctagcattgcgcgcagctcttctaataacaaaatgtatgttttggcgtcacgctccgcatcgcccaacgacgggttagcccctttgccgcccggaaactcccaatcgatgtctacaccgtcaaagaatttccacacttgcagaaattccttaaccgaatctacaaaaacgtttcttttttcaacatcgtgcataaaataaaatgggtctgatagagtccagcctcctattgaaggaagaatttttaaatgggggtttgctaattttgccgccatcaactgtccaaaattgcctttatacggctcgttccaagcggacacacctttttggggtttttgtacggcggcccacggatcgtgaatggcaactttgaaatcttcgcgtcccttgcacgatctttgcagagattcaaagcttccgggtatcgttttgagggcgtcgtttattccatcgccgccgcagatgggtatgaaaccatacaacaagtgtgataaatttggcaagggaactttgtctacgggaaagttgcgcccgtacacaccccactcaacaaagtacgcaccgataattttatcctctctcctgccaggtttgttgttttccagccatgtgtattcgagtggtgttagatggccgccgtccgtgtctgcgattttgaccaacacgggattgctcacggaacaaccgtcctcattgcaaagtttgacacgcatgttaaattgcccgctcacaagaactttaatggtagctcttttactttcggcgtcgcctttccatacctgctgctcgtcaaacaacacgtacgctatgtcgccaatgtcgccgttccagacgttccaactgacttgaacgtcgacgtgttttttaggctttattaaattttcgtaagcggtggcctcgtaatttatttctacgagcgcataattgcgatcggcccaatcaatcaccggtgtgccgggaattgcgtaggtaacggcgaccagccacaaaacgtttaacaatttgtacaacattttaatttatcttaattttaagtcgttattattttatgtaaaaaaatgaacaaaattttgttttatttgtttgtgtacggcgttgtaaacagcgcggcgtacgaccttttgaaagcgcctaattattttgaagaatttgttcatcgatttaacaaagattatggtagcgaagttgaaaaattgcgaagattcaaaatttttcagcacaatttaaatgaaattattattaaaaaccaaaacgattcggccaaatatgaaataaacaaattttcggatttgtccaaagacgaaactattgcaaaatacacaggtttgtctttgcctattcaaactcaaaatttttgcaaagtaatagttctagaccaaccaccgggcaaagggccccttgaatttgactggcgtcgtctcaacaaagtgactagcgtaaaaaatcagggcatgtgtggcgcctgctgggcgtttgccactctggctagtttggaaagtcaatttgcaattaaacataaccagttgattaatctgtcggagcagcaaatgattgattgtgactttgtcgacgctggctgtaacggcggattgttgcacacagcgttcgaagctatcattaaaatgggcggcgtacagctggaaagcgactatccatacgaagcagacaataacaattgtcgtatgaacaccaataagtttttagtccaagttaaagattgttatagatacattaccgtgtacgaagaaaaacttaaagatttgttacgccttgttggccctattcctatggccatagacgctgccgacattgttaattataaacagggtattataaaatactgtttcaacagcggtctaaaccatgcggttcttttagtgggttatggtgttgaaaacaacattccatattggacctttaaaaacacttggggcacggattggggagaggagggatttttcagggtacaacaaaatataaacgcctgtggtatgagaaacgaacttgcgtctactgcagtcatttattaatctcaacacactcgctatttgaaagcatactctatcgtctcagtagctcaaggtagagcgtagcgctttggatcgtatagatcttgctaaggttgtgagttcaagtctcgcctgagatattaaaaattgtaattttaaaaattttattttataatatacaattaaaaactaaacaattttttattattacattaataatgatacaatttttattacatttaatattgtctattacggtttctaatcatacagtacaaaaacaaaattacaattaatataattacaaagttaactacatgaccaaacatgaacgaagtcaatttagcggctaattcgccttcagccatggaagtgatgtcgctcaaactggtgccgacgccgccaaacttggtattctccatggtggttatgaggttgcttttttgttgagcaataaacgaccagccgctggcatctttccaactgtcgtgataggtcgtgttgccgatggtcgggatccaaaactcgacgtcgtcgtcaattgctagttccttgtagttgctaaaatctatgcattgcgacgagtcggtgttggccacccaacgcccttccttgtaaatgctgttgttgtagcaattactggtgtgtgccggcggattggtgcaaggcatcagcaaaaacgtgtcgtccgacaaaaatgtcgaagaaacagagttgttcatgagattgccaatcaaacgctcgtccaccttggccacggaaactatcaggtcgtgcagcatattgtttagcttgttgatgtgcgcatgcatcagctcaatgttcattttcagcaaatcgttttcgtacatcagctcctcttgaatatgcatcaggtcgcctttggtggcagtgtctccctctgtgtatttggccctaacgttgtggcgccaagtgggcggccgcttcttgactcgatgctcaactttgcgtttaatgcatctgttaaacttgcaattccacgtgtttttcgaaagatcatatatatcgttgtcaatcaaacagtgttcgcgtgttatcgaatcggggttatttttgtcatctttaatgagcagacacgcagcttttatttggcgtgtggtgaacgtagacttttgtttgagaatcatactcacgccgtctcgatgaagcacagtgtccacggtcacgttgatggggttgccttcggcgtccaaaatgtacacttggcactcgtccgtgtcgtcttggcactcgagcctgctgtacattttcgaagtggaaatgccgcatcgccacgatttgttgcacgtgtggtgcgcaaagtgattgttattttgccgcttcaccaattctttgcctttgacccactggccgcggccctcgttgtcgcgaaaacaatcgtcgctgtcactgccccaacgatcgatcagctcttcgcccacctcgcactgctgcctgatgctccacatgagtaaatcctccttgcccacattcagagtttttatggtttcttcgacgcgtgtgttgggatccaatgagccgccgttgtacgcatacgcctggtagtaccccttgtagccgataatcacgttttcgttgtagtccgtctccacaatggtaatttccacatccttttgcagcgtttccttgggcggggtaatgtccaagtttttaatcttgtacggacccgtcttcatttgcgcgttgcagtgctccgccgcaaagcccgaatgcgtcgccgtcaaaagcacatataaaacaatagcgcttaccatcttgcttgtgtattccttattgaagccttggtgtgactgatttactagtagcattgaggcatcttatatacccgaccgttatctggcctacgtgacacaaggcacgttgttagattaacaatcttatatttttatcttaattgataagatattttttatctggctgctataaaaacggaatcatgaacacggacacccagtcggcattgaacacgcgcaatttcatgtactctcccgatagcagtctggaggtggtcatcattaccaattcggacggcgatcacgatggctatctggagctaaccgccgctgccaaaataatatcaccttttcttagcagcaacagttcggccgtgtggaccaacgcggccccttcgcacaaattaatcaaaaacaataaaaattatattcatgtgtttggtttatttaaatatttgtcaaattacaatttaaataataaaaagcgacctaaagaatattacactcttaaatcgattattagcgacttgcttatgggcgctcaaggcaaagtatttgatccgctttgcgaagtaaaaacgcaactgtgtgcgattcaggaaagtctcaacgaggctatttcgattttaaacgttcatagcaacgatgtagccgccagttcgcctgggccagacattaacaaattgcaaaatttaatacaagatttgcagtctgaatataataaaaaaattacctttaccactgatacaattttggacaatttaaaaaatataaaagatttaatgtgcctcaataaataataataagggttttgtacaatttcaacaatgaacttctgggccacgtttagtatttgtctgatgggttatttagtgtacgcgggacacttgaataacgagctacaagaaataaaatcaatattggtggtcatgtacgaatctatggaaaagcatttttccaatgtagtcgacgaaattgattctcttaaaacggacacgtttatgatgttgagcaacttgcaaaataacacgattcgaacgtgggatgctgttgtaaaaaatggcaaaaaaatatctaatctcgacgaaaaaattaacgtgttattaacaaaaaacggggtagttaacaacgttctaaacgttcaataacgcttatcactaagttaatatactaaaaatcacatagtcactacaatatttcaaaatatgaaaccgacgaataacgttatgttcgacgacgcgtcggtcctttggatcgacacggactacatttatcaaaatttaaaaatgcctttgcaagcgtttcaacaacttttgttcaccattccatctaaacatagaaaaatgatcaacgatgcgggcggatcgtgtcataacacggtcaaatacatggtggacatttacggagcggccgttctggttttgcgaacgccttgctcgttcgccgaccagctgctgagcacatttatagcaaataattatttgtgctacttttaccgtcgtcgccggtcacgatcacgatcacgttcgcgatcacgttctcctcattgcagacctcgttcgcgctctccccattgcagaccccgttcgcgatctcggtcacggtctagatctcggtcacgttcatcgtctcccaggcgaggacgtcgacaaatattcgaggcgttggaaaagattcgtcatcaaaacgacatgttgatgagcaacgtcaaccaaataaatctcaaccaaactaatcaatttttagaattgtccaacatgatgacgggcgtgcgcaatcaaaacgtgcagctcctcgcggcgctggaaaccgctaaagatgttattttaactcgactaaacacattgcttgccgaaattacggactcgttacccgacttgacgtccatgttagataaattggccgaacaattgttggacgccatcaacacggtgcagcaaacgctgcgcaacgagttgaacaacaccaactctattttgactaatttagcgtcaagcgtcacaaatatcaatggtacgctcaacaatttgctggccgctatcgaaaacttgataggcggcggtggaggcggtggcaattttaacgaagccgacagacaaaaactggacctcgtgtacactttggttaacgaaatcaaaaatatactcacgggaacgctgacaaaaaaataagcatgtccgacaaaacaccgacaaaaaagggcggcagccatgccatgacgttgcgagagcgcggcgtaacaaaacccacaaaaaagtctgaaaaattgcagcaatacaagaaagccatcgctgccgaacaaacgctcgagcaaacattacgcaccccagcagatgtttcttctttgcaaaaccccggggaaagtgccgtgtttcaagagttggaaagattagaaaatgcggttgtaattttagaaaatgaacaaaaacgattgtatcccatattaaatatgcctcttgataattttattgtggcatttgtgaatccgacgtatcccatgacctattttgtcaataccgattacaaattaaaactagaatgtgccagaatcagaagcaatttactttacaaaaacaaaaacgaggccactatcaatagacctaagatatcgtcttttaaagtgcaattgaacaacgtaattttagacactatagaaactattgaatacgatttacaaaataaaattctcacaattactgtacctgttcaagatcaaaaactaataaaatccattatttattttaatattttaaatagtgataattgggaagtaccaaagtatatgaaaaaattgtttgatgaaatggaattgaaacctcccgtcattttaccattaggtctttagatttggtaaggctagcacgtcgacatcatgtttgcatcgttgacctcagagcaaaagctgttattaaaaaaatataaatttaacaattatgtaaaaacgatcgagttgagtcaagcgcagttggctcattggcgttcaaacaaagatattcagccgaaacctttggatcgtgcagaaattttacgtgtcgaaaaggccaccagaggacaaagtaaaaatgaattatggacgctattgcgtttggatcgcaacacagcatctgcatcgtccaactcgtccggcaacatgttacaacgaccagcgcttttgtttggaaacgcacaggaaagtcacgttaaagaaaccaacggcatcatgttagaccacatgcgcgaaatcataaaaagtaaaattatgagcgcagtcgttgaaacggttttggattccggcatgttttttagcccgttgggtttgcacgccgcttcgcccgatgcgtatttttccctcgccgacggaacgtggattccagtggaaataaaatgtccgtacaattaccgagacacaaccgtggagcagatgcgtgtcgagttggggaacggtaatcgcaaatatcgcgtgaaacacactgcgctgttggttaacaaaaaaggtacgccccagttcgaaatggtcaaaacggatgcgcattacaagcaaatgcaacggcagatgtatgtcatgaacgcgcctatgggcttttacgtggttaaattcaaacaaaatttggtggtggtttctgtgccgcgcgacgaaacgttctgtaacaaagaactgactacggaaaacaacgcgtacgtagcatttgccgtggaaaactccaagtgcgcgcgctaccaatgcgccgacaaacgacggctttcgttcaaaacgcacagctgcaatcacaattatagtggtcaagaaatagatgctatggtcaatcgcggcatctatttagattatggacatttaaaatgtgcgtactgcaacgattttagctcagacagtcgggaagcgtgcgattctattttaaaacgcgagcacaccaactgcaaaagttttaatttgaaacataaaaacttccacaatcctacatacttcgattatgttaaaagattgcaaagtttgctaaagagtcatcattatagaaacgacgctaaaacacttgcttattttggttactatttaactcatacaggtactttgaagaccttttgctgcggatcgcaaaacttgtcacctaccaaacacgatcatttaaacgattgtgtatattacttggaaataaaataaaacctttatattatacaaaaaaattcttttatttattatcacattatgtttatacaattttagccacaataaatattgactcgttgttcagaaagtttaataagcttgttaatttcttcggcttgcaaagggctgtcaatgcattcgttttgaatgcgcttaatccgatttacagtattgttggcgcgattaataaactcctctactggcaaatttacaattttgtttgagtattcattgtacacggcggctaagttttgtaaaatgttttcgggaaagatggcaattctgttaaatttgacatgtttttgattgtatacatagttttgatattctttcaacgtaggatatttgtttaaacttttgacgcattcaatgtacaatttgtgcagtgacaaaattctgttaaaatccaaacgagaacatttttcaaaagttatttcttgaccgttgaaatttacactttgcaattgtttcaataaactgtcgtaaaaagtttttcctttttcaagcacaaacgcgggacgcatcgtgttatctacaacgcttatgtacttgtcaaaatcttcaattatatgatagaaatacaaatatctctccgcgtttatggacacgttgtttaaaacatgttcgtcaacaactccgttatgatttactttcaaaaatttcaaatcttgcaaagcctccgcgttgatcaacttgttgataataaatttgtctttgcattcaaacgctctgtttgcaatccattttacagcgtctaaaacggacatgcgtttaaacatgttgatacgttttaggcaatacgctcgtttttctatcgcctcaaagtctacgtccgtgtagtcgcaccattgcaggatttgcaacatgtcctcggcaaaatgcgcaaactgccgcaacttttcttttccaaaatgttgattgtcgtgtttaaaaagcaacgttgaaatttccgagacataccacaaagccgtgggcaatttcactttaatcagcggctccatagccaaattgctgaacccgatcatgcattctgtgttgttaatgcggtaaatgacatatcgtttgaagtagtcctttacattatcgtcaatgtattctgcgtcctttatgtgcttgtacagcaaatagtacataaggcccgcgttaaacgcgacctttttagcgtcaaaatacgtgcacgccaacacgtaatcgttgtattcgtcgaattgctcattgggcactatggctcctgtaaaaggacgcctgctgcgcggtgacaaacacgttccatgctgaatcaactgcttcaaactttccaaattataacaatattcaattgaatttttaatttctttattttggctccataaaagaggaaactcaagtcggtttttaaacttggtcaaactgccctgaattgtttcaaacaagttgtaatgtgttaacaatatggccgggacaccgctatcgttagctaaaatacaatcgggaaattgaatgttttctacgttgctgtaatcatacgtttcgtcgtcgtcgttggcaacaacatcgtcggtttcggcgttaacgctcgccagtttgttttgatagtgtaaatttttcattacatcaaaagcgtatgacttgttgcgattgtgcaaataatttatggccgtgctaatggtgctgtcgataattttatcaaaattgagaacatcggcgttatacaacgttttataaaattctgttgacttaaacgtgtttacaaactcatttttatttttaatctggtcaaaattcatactataattgttagtttgtttgatttcgccaaatagccgctggcggagacgcttcagcttgtccacctcgttcaacacgttggcgtccgtcggcatggaattgataaatttaaatcgaacaaaagacagcagttcgtctttttttaatatgaaattttcgcttgtgatgatatcgtagttaaattctttggttaaatcaacccattcgaccatttcattgttgcgataaatcttgcagtttgagttgttgacgaacgccgaggcaacggacaaatcaatctgttccgtgttattattgatggcatggaacacaatgcgttcgaaactaaacgggttttcgtttagtaaatttttgcaaacgttcgcttcacttttggaaatttggccgtcggtaaccatgtacaaaagtttcaacttgccgtctagtaagtttatattcttgtaaatccactttatgaattcgctgggcctggtgtcagtaccctctccattgcggcgcaaataacgactcttgacgtctccgatttctttttggcgacaataagcgctccaatgcaaatataaaactttgtcgcaactactaatgttttcgatttcattttgaaattgttctaaagtttgtaacgcgttcttgttaaaataatagtccgagtttgtcgacaaggaatcgtcggtggcgtacacgtagtagttaatcatcttgttgattgatatttaatttttggcgacggattattatatacacacgagcggagcggtcacattcagtaacacgagtgattgtgtgtatattatcgctgcgatagtggtcgcaaaaattacacacgcgtcgtaacgtgaacgtttatattataaatattcaacgttgcttgttttaagtcagcatttgagctttaccgttgcaaaatgtgtgtaatatttccggtagaaatcgacgtgtcccagacaattattcgagattgtcaggtggacaaacaaacaagagagttggtgtacattaacaagattatgaacacgcagttgacaaaacccgttcttatgatgtttaacatttcgggtcctatacgaagcgttacgcgcaaaaacaacaatttgcgcgacagaataaaatcaaaaatcgatgaacaatttgatcaactagaacgcgattacagcgatcaaatggatggattacacgataacattaaatattttaaagatgaatactattccgtaagttgccaaaaaggcagcgtgttgaaaagcaagtttgctaaaattttaaagagtcatgattataccgatgaaaagtctattgaagcttacgaaaaatactgtttacccaaattggttgacgaacgcaaagactactatgtggcggtgtgcgtgttgaaaccgggattcgaaaacggcagcaaccaagtgctatccttcgagtataaccccattggtaataaagttattgtgccgtttgctcacgaaattaacgacacgggactttacgagtacgacgtcttagcttacgtggacaatgtgcaatttgatggcgaacaattcgaagagtttgtacaaagtttaatattgccgtcgtcgttcaaaaattcggaaaaggttttatattacaacgaagcgtcgaaaaacaggagcatgatctacaaagctgtggaatttactacagaatccaactggagcagcagatccgaaaagtataattggaaaattttttgtaacggttttatttatgataaaaaatcaaaagtgttgtatactaaattgcacaatgtaactagtgcactcaacaagaatgtaacattaaacatgattaaataaatgttaaaatttattgcgtaatattatttaaaatatgtaactgcttgaccaaacttgctttacaagtaaaattctacttgtaatgcacgatcaggtatgagtcacgtttttgcacacggctcataactaaactcgctttacgagtagaattctacttgtaacgcatgattaatggatgatgtcatttgttttgcaatgatatcatacaatatgactcatttgtttttcaaaactaaacttgttttacgagtagaattctgcttgtaaaacacaatcaaaaaataacatcatttgttttttaaaactgaactcgctttacgggtagaattctacttgtaacacacaacaagaaatgatgtcatttgttttttgttaaactaaaatgatgtcatgttttgcacacggttcataactgaagtcgctttaccggtagaattctacgcgtaaaacgtgattgataattaaataattcattcgcaagctatacgttacattgagcggacattatggaattgtataatattaaatatgcaattgatttaacaaataaaattgtaataaagcaagtcgacaatgtggacgcgtttgtgcatatcctagaaccgggtcaagaagtgtttgacgaaacgctaaaccagtatcaccaatttcctggcgttgttagttcaattattttcccgcaactcgtgttaaacacaataattagcgttttgagcgaagatggcagtttgctcacgttaaaactcgaaaacacttgttttaatttccacgtgtgcaataaacgctttgtgtttggcaatttgccatcggcagtcgtgaataatgaaacgaaggaaaaactgcgcattggagctccgatttttgccgacgaaaagctggtttcggtcgtaacggcgttccatcgtgttggcgaaaacgaatggctgctaccggtgacgggaattcgtgaagcgtcccagctgtcgggacacataaaggtgctgaacggcgtccgtgttgaaaaatggcgacccaacatgtccgtctacgggactgtgcaattgccctacgataaaattaaacaacatgcgctcgagcaagaaaataaaacgccaaacgcgttggagtcttgtgtgttattttacaaagattcagaaatacgcatcacttacaacaagggggactatgaaattatgcatttaaggatgtcgggacctttaattcaacccaacacaatatattatagttaaataagaattattattaaatcatttgtatattaattaaaatattataccgtaaattacatttttattaacaatcatgtcaaaacctaacgttttaacgcaaattttagacgccgttacggaaaccaacacaaaggttgacagtgttcaaactcagttgaacggactagaggagtcattccagcttttggacggtttgcccgctcaattgaccgatcttaacactaaagtttcagaaattcaatctatattgaccggcgacatcgttccggatcttccaaactcactcaagcctaatctgaaaagccaagcgtttgaactcgattcagacactcgtcgtggtaaacgcagttccaagtaaagattcgttctaaaataacagatcaatagttttataatattcgtacgattctttgattatataataaaatgtgatcattagaaagattacaaaaaatataaaaaatatgagttctgtgtgtataacaaatgctgtaaatgccacaattgtgtttgttgcaaataaacccataactatttgattaaaattgttgttttctttgttcatagacaatagtgtgttttgcctaaacgtgtactgcataaactccatgcgagtatatagcgagctagtggctagcgcctgtcctactaaagtagattcgtcaaaatcctcaatttcatcgccctcttccaaatttaacatttggccatctgaatttacttctaaagatgccacataatctaataaatgaaatagagattcaaacgtggcgtcgtcgtccgtttcgaccatttctgaaaagaactcgggcataaactctatgatttctctggacgttgtgttgtcaaagctctcaaagtacgcggttaagaacgtgcgcgacatgtcgtcgggaaactcgcgcggaaacatgttgttgtaaccaaacgggtcccatagtgccaaaaccaaatctgccagcgtcaatagaatgagcacgatgccgacaatggagctggcttgaatagcgattcgagttaacgctttggcagtcacggtcagcgttttgatggcgatcacgttgagcgagtgcactaatgcggctttgtaagtttctcccaacatgcgcacggtcacgcgccgagtcgtgctaagcaacatgcgtttcatggccggaatgagagaagtgttaatttttttcaacaagcttttaaacccggacattagcatatcaaagccaatgtccgtagcaataccgaaaacgagagcgtaatcttccaaaaacgatgttataattgactccaaatcttggtcactgattgaacggtcaagcgcctcaaaatgttcgacacgtgcacgttcgttaccgtggtaattgtatgcaatcggagttttagtgaagccgctttcggccgtgtacgtgatctggacgggcgacccgttgacgatcatacccaaatcgtttagtgtgggatttttgttaaaaagtttttcaaattccaaatctgtggcggtatcgcgcacgctgcgccattgcgctagtattgcgttagaatccacgtcgggtcgtggtggtagtatgttggaaggcgctttgtaatcaaaatcgcgcaattcgctaaaaatgttgttggccagcattttgaaagtgacaaagattgtgtcgcccaacacgaatccaatgagcgattcccaccatctaaacgaacagccgccgttgaatagctctctgccgaaacgtcgacagtaggcttcgttaaattcgcctttaaagcgttcgggaaacagagggtcgggatcgggccgaacgttaaaacccggcacatcgtctacgcccatgattgtgtgttcttcggtgcgcaaatatgggctgttgaagtacattttggacagcgagtccactaaaatacatttgttgtcgagcgtgtatctaaattcggccgactgaacttgggtttcggcgccttcacgcatggccgccgccctgtccagatggtagcacgcaggctgcgcgtaacctacgctagtctcggaggtttgcgtatacataaacggcgtcgtgttggacacgacgccggtttcgtgaaacgggtagcagctcatgctttcgcatccgcgcttgctgaaagtcagtttgacagccagcgctttgttggccaatttcggcggtacataataatcgtcgtcacttgacgcgggacgcaacgtgtagtcaattagtatatgcggaaacctggtgcgccatctcgaaataaactcgagacgatgcatatgtatggcatacctactggcattagttaaatcgacggctgttaaaaccgccatgttacataggacttaaaataaacaacaatatataatgaaatatttattaggttatattattataatacatttgaattgattatgttttatttattagatacatttttatttacacattgttatttacaatattaattaactttttatacatttttaaatcataatatataatcatttcgttgtgcatttcaaagcttttgatagcttcaaagtaatacatgcacttagagtattcaggaaaatgataaacgttggtaaacccgcatttggtacaatataaaacgggatttttataatacaatttagtttttttacacaatttgcaatagttgttagtagtaggtttcaaaggaaacgtgatcgcgccatccaatacctgggtaaattttttaactttaacagtggcaaacacggttcctttgatacctgaaaatcggttgtcttgcagagcggccatcatttcgcttggttcttgaagtataaaacagttgacgtcatctaccacgtcgggtctcgtgcacatgcttcggtagcgttgcaacactatattggtgtatgtttccctgagaacgagaccgccggtggtgctaagatcgattgtttggatgcgctcgttgggttctttgtgatttcgaattatgcggcgaattatttcaaacactttgcagttgtgatcgtcaattctcaattctttaacttccgtcgtgtaatctaaactgacaggaaaaatgtattggtaaaaaaacctttctctggctaaatagctgaggtcgaccaaattgatggaaggatatatttcgtacgaggttttaggaacgttgtgatataaatagcatttttgacagcagatgtctatgcggccaggatcgtccaacggcttttcgatgtgaaccacaacatacaaaaaccattcgcgcgtgttgtctttgaatttataattgcaagttgtgcatcgcgaatcactcatgtgttccatagtcttcttgtatttcacaggcctgcttgcaaatttgcccgtcatgcgcatatctttgctgtttatgtagcccaagatgtaattggtggaaaattttagcgtggctttcatgatgtcacgttctaaatcgctcataaaatgcatacgcagatcgcgctcttgtttaaaatccagtttgtcgctgtacgcgggcaaaccttcaaacttgttaccaaactcgggcggcacaaaatatccatcttttctgttgacaactggtttttgacttaagatgctgtgctccaacggcttggctgaagaggcgcgcgtaagctgtttaggcggagagatgcgcgtaggtggtttgatgttagattttggcaacggacgaacaggcgacggcggcgagttggcggcaggcgttggcaaagataaagatttggcacgacctttgctttcagtctttggcgcgtcaaaaatgttattctctcgaaaaaagcggttcattgtaactgttagtagcactcagaaatcaacacggtactgtgcacgttcagccatcgagaggctttatatatggaaaccttatctaaagagataaaattgtatatgcgtaggagagcctggtcacgtaggcactttgcgcacggcactagggttgtggagggggacaggctatataaagcccgtttgcccaactcgtaaatcagtatcaattgtgctccggcgcacacgctcgcttgcgcgtcgcatagtataagtaattgataacgggcaacgcaacatgataagaaccagcaatcacgtgctgaacgtccaggaaaatataatgacgtcaaattgtgcgtcatcgccatattcgtgtgaggcaacgtccgcttgcgcagaagctcagcaggtaatgattgataactttgttttctttcacatgtacaacgctgacatacaaattgacgcaaaattgcaatgcggcgtgcgttcggccgcgtttgcaatgatcgacgataaacatttggaaatgttcaagcatagaatagagaataaatttttttattactatgatcaatgtgccgacattaccaaacccgaccgtctgcccgatgacgacggcgcgtgttgtcaccattttatttttgacgcccagcgtattattcaatgtattaaagagattgaaagcgcgtacggcgtgcgtgatcgcggcaatgtaatagtgttttatccgtacttgaaacagttgcgagacgcgttaaagctaattaaaaattcttttgcgtgttgttttaaaattataaattctatgcaaatgtacgtgaacgagttaatatcaaattgcctgttgtttattgaaaagctggaaactatcaataaaactgttaaagttatgaatttgtttgtagacaatttggttttgtacgaatgcaatgtctgtaaagaaatatctacggatgaaagatttttaaagccaaaagaatgttgcgaatacgctatatgcaacgcgtgctgcgttaccatgtggaagacggccaccacgcacgcaaaatgtccagcgtgcaggacatcgtataaataagcacgcaacacaaaatgagtggcggcggaaactttttaactctggaaagagatcattttaaatatttatttttaaccagctattttgatctaaaagataatgaacatgttccttcagagcctatggcatttattcgcaattacttaaattgcacgtttgatttactagacgatgccgtgctcatgaactattttaattacttgcaaagtatgcaattgaaacatttggtgggcagcacgtcgacaaacattttcaagtttgtaaagccacaatttagatttgtgtgcgatcgcacaactgtggacattttagaatttgacacgcgcatgtacataaaacccggcacgcccgtgtatgccacaaacctgttcacgtccaatccccgcaagatgatggctttcttgtacgctgaatttggcaaggtgtttaaaaataaaattttcgtaaacattaacaactacggctgcgtgttggcgggcagtgccggttttttgtttgacgatgcgtacgtggattggaatggtgtgcgaatgtgtgcggcgccgcgattagataacaacatgcatccgtttcgattgtatctattgggtgaagacatggctaagcactttgtcgataataatatactaccaccacacccttctaacgcaaaaactcgcaaaatcaacaattcaatgtttatgctaaagaatttttacaaaggtttgccgctgttcaaatcaaagtacacggtggtgaacagcactaaaattgtgacccgaaaaccaaacgatatatttaatgaaatagacaaagaattaaatggcaactgtccgtttatcaagtttattcaacgcgactacatatttgacgcccagtttccgccagacttgcttgatttgctaaacgaatacatgaccaaaagctcaataatgaaaataattactaaatttgtgattgaagaaaaccctgctatgagcggtgaaatgtctcgcgaaattattcttgatcgctattcagtagacaattatcgcaagctgtacataaaaatggaaataaccaatcagtttcctgttatgtacgatcatgaatcgtcgtacatttttgtgagcaaagactttttgcaattaaaaggcactatgaacgcgttctacgcgcccaagcagcgtatattaagtattttggcagtaaatcgtttgtttggcgccacggaaacgatcgactttcatccaaacctgctcgtctaccggcagagttcgccgccggtccgtttgacgggcgacgtgtatgttgttgataagaacgaaaaagtttttttggtcaaacacgtattctcgaatacggtgcctgcctatcttttaataagaggtgattacgaaagttcgtctgagttgaaatcccttcgagatttgaatccttgggttcagaacacgcttctcaaattattaatttccgattcatcagtacaataatatgatttacaccgatcccactaccggcgctacgaccagcacagacgcgccatccacaaactatttaaacaggctaactccaaacatgtttttaaccatcttggcggtagtagttattatcgctttaataattatatttgttcaatctagcagcaccggcaacaacagcagttcaccaaatacacccaatgcaaatatgggtttcgtaaatcctttaaatgctaccatgcgagctaatccctttatgaacacgcctcaaaggcaaatgttgtagataagtgtataaaaaaatgaaacgtatcaaatgcaacaaagttcgaacggtcaccgagattgtaaacagcgatgagaaaattcaaaagacatacgaattggccgaatttgatttaaagaatctaagcagtttagaaagctatgaaactctaaaaattaaattggcgctcagtaaatacatggctatgcttagcacactggaaatgactcaaccgctgttggaaatatttaggaacaaagcagacactcggcagattgccgccgtggtgtttagcactttagcttttatacacaatagattccatccccttgttaccaattttactaacaaaatggagtttgtggttactgaaaccaacgacacaagcattcccggagaacctattctatttacagaaaacgaaggtgtgctgctgtgctccgtagacaggccgtctatagttaaaatgctaagtcgcgagtttgacaccgaggctttagtaaactttgaaaacgacaactgcaacgtgcgaatagccaaaacgtttggcgcctctaaacgcaaaaacacgacgcgcagcgatgattacgagtcaaataaacaacccaattacgatatggatttgagcgattttagtataactgaggttgaagccactcaatatttaactctgttgctgaccgtcgaacatgcctatttacattattatatttttaaaaattacggggtgtttgagtattgcaaatcgctaacggaccattcgctttttaccaacaaattgcgatcgacaatgagcacgaaaacgtctaatttactgttaagcaaattcaaatttaccattgaagattttgacaaaataaactcaaattctgtaacatcagggtttaatatatataattttaataaataattaaataatatacaatgtttttattaattatatttttaatattaattaaagtattattatttaaaaaaatgaatcaaatccatctaaaatgtcacaatgataagatttgtcctaaaggttattttggcctcaacgccgatccctatgattgcacggcgtattatctctgtccgcataaagtgcaaatgttttgtgaattaaatcacgaatttgacttggactccgccagctgcaagcctatcgtgtacgatcaaacgggcagcggatgtacggctcgcatgtatagaaacttgttactatgaggaacggctttccagttgcacaacactattatcgatttgcagttcaggacataaatgtttaaatatatcaatgtctttgtgatgcgcgcggcatttttgtaggttattgataaaatgcaccgacacgttgcccgacattattatcaaatccttggcgtagaatttgtcgggtccgctgtccgtgtgcgctaacatgcccgtaacagacctcgtacttttggcttcaaaggttttgcgcacagacaaaatgtgccacacttgcagctctgcgtgtgtgcgcgttaccacaaatcccaacggcgcggtgtacttgttgtatgcaaacaaatctcgataaaggcgcggcgcgcgaatgcagctgatcacgtacgctcctcgtgttccgttcaaggacggtgttatcgacctcacattaatgtttatcggtcgactgttttcgtatccgctcactaaacgggtttttgcattaacattgtatgtcggcggatgttctatatctaatttaaataaataaacgataaccgcgttggttttagagggcataataaaagaaatattgttatcgtgttcgccattagggcagtataaattgacgttcatgttggatattgtttcagttgcaacttgacactggcggcgacaagatcgtgaacaaccaagtgactatgacgcaaattaattttaacgcgtcgtacaccagcgcttcgacgccgtcccgagcgtcgttcgacaacagctattcagaattttgtgataaacaatctaatgactatttaagttattataaccatcccaccccggataatggagccgacacggtaatatctgacagtgagactgcggcagcctcaaactttttggcaagcgtcaactcgttgactgataatgatttggtggaatgtttgctcaaaaccacggatcatctcgaagaagcagttagttctgcttattattctgaatcccttgagcagcctattgtagaacaaccatcgaccagttctacttatcatgcggaatcttctgatggtgtgaatcagccgtcggcaactggaactaaacggaagctggacgaatacttggacaattcacaatgtatagtgggccagttcaacaagaataaattgaggcctaaatacaaaaaaagcacgattcaaagcagtgcaacccttgaacagacaattaatcataacacgaacatttgcacggtcgcttcaactcaagaaattacgcattattttactaacgattttgcgccgtatttaatgcgtttcgacgacaacgactacaattccaacaggttctctgaccatatgtctgaaactggttattacatgtttgtggtaaaaaaaagtgaagtgaaaccgtttgaaattatatttgccaagtacgtgagcaatgtggtgtatgaatatacaaacaattattacatggtagataatcgcgtgtttgtggtaacttttgataaaattaggtttatgatttcgtacaatttggttaaagaaaccggcatagaaattcctcattctcaagatgtgtgcaacgacgaaaccgctgcacaaaattgtaagaagtgtcattttgtggatgttcaccacacgtttaaagctgctctgacttcatattttaatttagatatgtattacgcgcaaactacatttgtgactttgttacaatcgttgggcgaaagaaaatgtgggtttcttttgagcaagttgtacgaaatgtatcaagataaaaatttatttactttgcctattatgattagtcgtaaagaaagtaatgaaattgagactgcatctaataatttctttgtatcaccctatgtgagtcaaatattaaagtattcagaaagtgtgcagtttcccgacaatgccccaaacaaatatgtggtggacaatttaaatttaattgttaacaaaaaaagtacgctcacgtacaaatatagcagcgtcgctaatcttttgtttaataattataaatatcatgacaatattgcgagtaataataacgcggaaaatttaaaaaaggttaagaaagaggacggtagcatgcacattgtcgaacagtatttgactcaaaatgtggataatgtaaagggtcacaattttatagtattgtctttcaaaaacgaggagcgattgactattgctaaaaagaacaaagacttttattggatttctggcgaaattaaagatgtagacgttagtcaagtaattcaaaaatataataggtttaagcatcacatgtttgtaatcggtaaagtgaaccgaagagagagcactacattgcacaataatttgttaaaattgttagctttaattttacagggtctggttccgttgtctgacgctataacgtttgcggaacaaaaactaaattgtaaatataaaaaatttgaatttaattaattatacacatatattttattacttttgttttttattatcgaggggccgttgttgatgtggggttttgcatagaaataacaataggagttggcgacgttgctgtgctagttccaccgccaccacttcctcctcctttcattatgtatcggtaaataaaataaaatattaaacctaaaaacaagactgcgcctatcaacaaaatgatgggcattaacttgccgctgacgctgtcactaacgttggacgatttgccgactaaaccttcatcgcccagtaaccaatctagacccaagtcgccaaccaaatcaccaaacgagtaaggttcgatgcacatgagtgtttggcccgcaggaagatcactaatatctacgtactgaggcgaatctgggtcggcggacggatcgctgccgcgacaaactgttttttctacttcatagttgaaaccttggcacatgttggttaattcgggcggattgttaggcaacaaggggtcgaaagggcaaatggcaacatccgactgatttagattaggatcttgacgacaagtgcgctgcaataacaagcaagcgtcggcgttttctccgccgtttttaccttgcacataataactgccgccggtgttattgatggcgttgattatatcttgtactagtgtagcggcgctaaacaaaaaataaccgccggtggccaacagtatgcccgttcctcctacttttaaactttgcatgtaggtatgtaaacgggggttttgctgcaatgcgttttgaacaccttcgggcgtgcgcacgttggtttccgggaagttttgtttgactgcattggaacgcgtctgtttggtgtggtaattaaagtctggcacgttgtccacgcgccgcaattggcctaatgaatttatttgggggtctgaaatgccctgaaacactccgcgtatgttggggacatcgttgttacgagtaattctgtttatgtctgaagtgctcacaaactggttgttagataattgataacccggctggaatctgttgtttccaatgttgcgtacactgggcgcgttgagcacatttgtgaaaccggcgggagtacttgttaaaagacgcgtattatcagtaataaaactggcctgattaggatacaatttattgactgcacgaagatttgaaaaaaaactcattttaaagcaaacttatttaataaatatatcacattaaaggttttgcaaaactgccgtcgtcaatactacacggcagcggcgtcatgttggtaaaatctaatcgtcttcttgctttagattctgggcgagaaggcgcatttgttgtgtaagttatttcgacgtctgcattatttgttgtgtaaggtatttcgacgtatgaggcaactttaacattgttataattttttttaaatattgatgcgctccacggcgcgcgttgatacggatgatatctctccattgtatgatcgctaaagttatataccgttttaataaatatgtttaaacccaacgtgttaattataatattcataatagtttgtttaataattatttttgttttaaaatctaaaggcgatgaccaatcagacgacgaatttagttgctataacaaaccaattggagtaaattttccgcattctactagatgtgacgctttctacatgtgtgtcggtttaaatcaaaaattggagttattttgccctgataaatttgaatttgatccagatgttaaaaattgtgtccctatatcagatcatggatgtaccgctaaccaaaacagaataaaataaaatttatttatattatatatttttattatttacatattcacaatacattaacgtctagacataacagtttgtaacttagaaactaaatcagaattattgcgctcaaactctaaaaatttggcttgagactcgaccacttgcttatttaattgttcttgcagattgttcacagtcgactgcaactcttctgatttcttggtagattcttgcaagtcatagtttgccttttgtaaatctaattcagcaacagcatgtttgtgtttaagcataatgtagtcgctgtttaacatagtcattttatgttccacttggcaggtcttggctcgtagctcggccagttctttttgcaattgctccacatagttcaagtccgtggtttgattgttgaccgtgttattttccaaaagctcgcgccaatgttgtttaatagaatcctggttacgagtgacgtcgatgggcataaattctacatacccgtgcttattgtacacacgacaatttgatgaagtagcgctgcaaaaacatttgtacacggaattggccataattattttgacataacacttgaaacacacagcatgattacaatgagtcgttgtcacaaacgaagaatttacgtttttagtgtctttgaaagtagtaaaacaaatgttacacgaaacttccacatcttcttccggttcagattgttgctgctgctccgaagattgcggcgatgcaaacaagtctggcgattgcggtattacgtaattcggcgaattcggagcgtaagatggactatagacgggagaccgtggggcaatctcattcatcagctgagcttcaagatctaaggcccgctgcagagccctctgtgcagctgtctccgatgcaatgttattctggtattgctgggaactgatgtcaggaaaccgttcacgatccacattttcactgttaattagtatgacgtcatcctcttggcttaataacggatcggcattgctaatgttaacctcaccgtgaacgttatacgtaacaccttgacgatggtagctgcgagttaacggctcgttgacgttcccaataatctgcacgttttcttcgctgacacgctgctcctgacgccgttcctgacggcgatggctgcgactgcttgaagacgtttggctgcgactgcttgaagacggctgggcttcggaaggtgttgtaaagttgatgcgacgacggctaagagatagcctgtggtggcggctgctgctgggagtggcggcgttgatttggcgactcatggctgggttggtaggatactgttcactaggctgtgaggcttgaactgtgcttacgagtagaacggcagctgtatttatactctttatcagtactgcacgattgataaaacaatagtagtgggggaacttgccaagcaataatgaacttttttgtaatgcaaaaaagttgatagtgtagtagtatattgggagcgtattgtacagtgtagactattctaataaaatagtctacgatttgtagagtttgtattgtatattgaatgccgagcaaaagtgaacttttttgcattgcaaaaaagttcattttaattttaaatttttatatctgcagtttctgttatctgtccccactcaagcgtgcagcctataaaagcaggcattcaccaactcgtaagcacagtttgttgtgaagtgaacacagagagcctgccagtaagcaaaatgccaagagacactgaaaaccgccatcggtctacgccatatgaccgtcctacgcttgaagatcttcgcagacagttgcaggacaatttggacaacataaaccgccaagatagcgtgcaagaagaggaaaacggcagcgatctgcgctccagcaatagcgacgtgcgtagaaggcagcgtcgaaaccagctccgctccatacaaatggagcagcagcgaatgatggcggaattaaacaacgagcctgtgattaattttaaatttgagtgtagtgtgtgcctagaaacatattcccaacaatctaacgatacgtgcccttttttgattccgactacgtgcgaccacgggttttgtttcaaatgtgtcatcaatctgcaaagcaacgcgatgaatattccgcattccactgtgtgctgtccattgtgcaacacccaggtaaaaatgtggcgttcctgcaagcctaacgctgttgtgacgtgtaagttttacaagaaaactcaagaaaaagttccgcccgtgcagcagtataaaaacattattaaagtactacaagaacggagcgtgattgtcgaagacgacgatagctgtgacataaatatggagaatcaagcaaagatagttgctttggaagctgaattgcaagaagaaaaaaataacagcgatcaagtagcttctgaaaaccgacagttgataaacgaaaataatcgtttaaacgagcagattcaacagttgcagaatcaggtgaggacattagtgccgcaacgtggcattatggttaatcagcaaattggccgtgacgacactgcgccagccgagctaaacgagcgttttcgttcgcttgtctattcgactatttcagagctgtttattgaaaatcgcgttcacagtattcaaaattatgtatatgccggaacttctgctgctagttcgtgtgatgtaaatgttactgttaattttgggtttgaaaattaaatatgatgtatgtataaatttataataaagatcacaaataaacattttttgtaaaaataataaataaacattttatactttttatgttttttattttatgtgattaagaaacttttaacatggatagcagtaattgtattaaaatagatgtaaaatacgatatgccgttacattatcaatgtcacaataacgcagataaagacattgtaaatgcgtatgacactatcgacgttgaccccaataaaaaatttataattaatcataatcacgaacaacaccaagtcaatgaaacaaataaacttgtcgataaaacatttataaatgacacagcaacatacaattcttgcataataaaaatttaaatggcatcggaataacaaatgacatcatcccttgatcatgttttacacgta

SEQ ID NO: 4 - DNA, 128413 bp, Bombyx mori nucleopolyhedrovirus
atgccgaattattcatacacccccaccatcgggcgtacttacgtgtacgacaataaatattacaaaaacttgggctgtcttatcaaaaacgccaagcgcaagaagcacctagtcgaacatgaacaagaggagaagcaatgggatcttctagacaactacatggttgccgaagatccctttttaggaccgggcaaaaaccaaaaacttaccctttttaaagaaattcgcagtgtgaaacccgataccatgaagttaatcgtcaactggagcggcaaagagtttttgcgtgaaacttggacccgttttgttgaggacagcttccccattgtaaacgaccaagaggtgatggacgtgtacctcgtcgccaacctcaaacccacacgccccaacaggtgctacaagttcctcgctcaacacgctcttaggtgggaagaagactacgtgccccacgaagtaatcagaattgtggagccatcctacgtgggcatgaacaacgaatacagaattagtctggctaaaaagggcggcggctgcccaatcatgaacatccacagcgagtacaccaactcgttcgagtcgtttgtgaaccgcgtcatatgggagaacttctacaaacccatcgtttacatcggcacagactctgccgaagaagaggaaatcctaattgaggtttctctcgttttcaaaataaaggagtttgcaccagacgcgcctctgttcactggtccggcgtattaaaacactatacattgttattagtacatttattaagcgttagattctgtgcgttgttgatttacagacaattgttgtacgtattttaataattcattaaatttgtaatctttagggtggtatgttagagcgaaaatcaaatgattttcagcgtctttgtatctgaatttaaatattaaatcctcaatagatttgtaaaataggtttcgattggtttcaaacaagggttgtttttgcaaaccgatggctggactatctaatggattttcgctcaacaccacacgacttgccaaatcttgtagcagcaatctagctttgtcgatattcgtttgtgttttgttttgtaataaagattcgacgtcgttcaaaatattatgcgcttttgtatttttttcatcactgtcgttggtgtacaattgactcgacgtaaacacgttaaataaagcttggacatatttaacatcgggcgcgttaggccgattattgccgccgtcgtcccaaccctcgtcgttagaagttgcttccgaagacgattttgccatagccacacgacgcctattaattgtgtcgactaacacgtccgcgatcaaatttttagttgttgagtttttcggaattatttctgattgcggacgtttttgtgcgggtttcaatctaactgtgcccgattttaattcagacaacacgttagaaagcgatggtgcaggcggtggtaacatttcagccggcaaatctactaatggcggctgtaatggagctgatgataaatctatcattggtggaggcgcaggcggggctggcggcggaggtggtggcggcggtgatgcagacggcggtttgggctctttaggcaacacagtcgtcggcacctcaattattgtattggtttcgggcgccgtttttggtttgaccggtctgagacgagtgcgatttttttcgtttctaatagcttccaacaattgttgtctgtcgtctaaaggtgcagcgggttgaggtttagtcggcattggtggagcgggcggcaattcagacatcgatgatggcggtggtggtggtggaggtggaggcgctggaatgttaggcacggaagaaggtggtggcggtgccgccggtattataatttgttctggtttagtttgttcgtgcacgattgtgggcaccggcgcaggcgccgctggctgcacaacggaaggtcgtctgcttcgaggcagcgcttggggtggtggcggcggcaattcaatattataattggaatacaaatcgtaaaaatctgctataagcattgtaatttcgctatcgtttaccgtgccgatatttaacaatcgctcaatgtaagcaattgtattgtagagggattgtctcaagctcggatcccgcacgttgatgacaagccttttcatttttaccacagcattgtagtagcgagacacttcgctgtcgtcgacgtacatgtacgctttgttgtcaaaaacgtcgttggcaaactttaaaatatttaaaaaaacatctctgttcagcaacactgtgttgtcgtaaatgctgtctttgataatttgcgcttccgcagtatcgacgcgttcaaaaaattgatgtgcatcaattttattgttcctattattgaataaataagattgtacagattcatatttacgattcgtcatggccaccaccaccgccacaaatgctacgctgcaaacgctggtacaattttacgaaaactgcaaaaacgtcaaaactcggtataaaataatcaacgggcgttttggcaaaatatctattttatcgcacaagcccactagcaaattgtatttgcagaaaacaatttcggcgcacaattttaacgtcgacgaaataaaagtccaccagttaatgaacgaccacccaaattttataaaaatctattttaatcacggtttcattaacaaccaagtgatcgtgatggactacatcgactgtccggatttatttgaaacgctacaaattaaaggcgagctttcgcaccaacttgttagcaatattattagacaactgtgtgaagcgctcaacgatttgcacaaacacaatttcatacacaacgacataaaactcgaaaatgtcttatatttcgaagcactcgatcgcgtgtatgtttgcgattacggattgtgcaaacacgaaaacttacccagcgtgcacgacggcacgttggagtattttagtccggaaaaaattcgacgccacaactatgcacgttcgtttgactggtacgccgtcggcgtgttaacgtacaagttgctaaccggcggccgacacccgtttgaaaaaagcgaagacgaaatgttggacttgaatagcatgaagcgtcgtcagcaatacaacgacattggtgttttaaaacacgttcgtaacgttaacgctcgtgactttgtgtactgcctaacaagatacaacctagattgtagactaacaaattacaaacaaattataaaacatgagtttttgtcgtgagtggtgttaataaaaatcataaaaattattgtaaatgtttattatttaaaaacgattcaaatatataataaaaacaatctacatctatttcttcacaatccataacacacaacaggtccatcaatgagtttttgtctttatctgacatactatgtgcatgtaacaaatcaaatacatcttttaaatctctatacacatctatacattgtctaccaaaatctttaataactgtataacatgaaaaagacttttcttcttgcgtggttttgccgcgtagatattgaaataaaatgtgcatgcacgacaatttgtgtttactaaaatgctctttgcctataccgcaaaaccggccatacatttcggcaattacacgcggacaattgtacgattcgtctacgtgtaaacgatcatcataatcacttttgctcaaacgaataaattttttcaccgcttccgacaaacgaggcaccaattcggcgggcacgcttcgatgcattattctgtgcacataagttatcacacaaaatttattgtaccaccatccgacagcgtcgctattagggttgaacacgttggcgatgtgcagcagttttccgtttctcatgaaatgttcaaagcggcccaaaataatttgcaagcagcccaacatgtcttgagaaatttctcgttcaaaattgttcaaagagaatatctgccgtccggtttgaacgcgcacgctgacgggaaccaccgcgtcgatttgctccaacactttacggacgttatcgtcgatgcccgtcgtttcgccggtgctgaaccaatgggaaaggcttttgatggaatcgcccgcgtctatcatcttgaccgcttcgtcaaaggtgcaactgccgatcttcaaacgccgcatagcggtcacgtcccgctctatgcacgacatatcgtttacgtacgattctgataggtattcctgaactatacggtgatggtgatacgactcgccatacacgtcgtgcacctcattgtatttagcataataattgtaaattattaactttgcagcgagagacatgttgtcagtaaggcaatgataagctcaataatactgatgtacaggcacgcgtgatatttatatataatttcgcaaggaggggagttgttatcaattgctattttaaagaatgaccgtctgtttttatcgcaagcttggcagcctcaaccacgaagcgtcgtcattgtaaatatgcctcaagaattatttgacaagattgtcatctgattactgcaattatttattgtttcgttgtgtaaatatttagaaaaaaacaaaatgtacaatcaaactattttatatattatttatacgaaataaatacatactaataactattatacatgtttttattttacaatacttcttgtataacctctttaactacattatgagtacaatccacgtcgattacacgtttagctatttttctaattttgtaatgtttatcgtagagtttttcgttaatacattgaattgccaacaagggatttgggtgcacaccgtcatagagcacttccatgtcgtcttcaaagcgcatttttcgcttgcgaaaatgtcgctcttggcccaaaacaaaagcgagtttgatgcggtcgtcgatgcgttccgaaaatatggccaaatgctggtgtttggtaatgtcgcgcggaaacgtcaccgtgccatttttgctttccgttacgatggcggttttcaatttttcggccgactgcagcatgttaagtttggcgtcgagttcgttcaaacgcaattcaaactgctcaaacctgttgcccacatcgttcttgaacgtttcgtgggtgaccataaatttttcgctgtttgtattcagtttttttacatgttttaaaacagattcaattttgtcgcgcaaatcatcacgctcgccttcagtttgaaggtgcagcaacgcgttgcttttgttgtcaaaatttaaccgcatcaaaattttcaacaacccctgcttggtcgcgaacaatgcgcccaacgagttgagatcgcgtttggatttctgcttgtgaaaaataatttcgtttaaatggtaaacttgatcgctgtcccaattgcaatcaagtatgtcgtcgtgcgcaatttcaagacctttgcaaaaatctattacattgtagaattttgcgttcgtgtcgttgtgcacgtatctgtacttgaaactgtgcgtgttgcatttgaatgaatcccatttaacgatgtgcgaccattgttggacgtttatgtggtactttttgtagtcgtctggatcgaaccgatcttcggcggcgatggcggcgtcgttgtcgtcgtcgtcgttgtcaccggaccacatccaccaattccataaccaggatagcattgctttaatttgtctagcaattcctttgttatacaacgagaaaatttagttcccttataattatagctgtacggtgcgcgtatttgtttgttaacgttacaaaaaatatccctgtccacgtccggccaatactgcaacgtgagcgcgtccaagtttgaatcttgcatatgcggaatgtacaaacgtacggcctctctcacacaatgcgcaaaactgcccggctgaatgcaatcactatccaactttgcaggtttttcgaaggccttgtaccgatgcacgcgaacattttgagcggacgtgattttaaacttgtcggtgaattttaaccacaagtgaaatccacggttgccggtatacatgactcttgacacgttctcttccgtgtaaaacaacaaaaacgccgtggcgccaatgtaaattttcagcattaaatcgtgttcgtcaacataattcttgtaatcggcgtctacgacccattccctgccgccgccgtcgtccaacggtttgacgtgcacgtcggacactttgttttgcacaatgtaactatacaattgtgcggcggtatcaaaatatttgtcggcgtgaatccagcgcgcgttgaccgtcatgaacgcgtacttgcggctgtcgttgtacgcaatcgcgtcccacatcatgtcgacgcgcttctgtgtataattgcacaataacatgctgccctttgaactcgacctctattgtgttaatttttggttataaaaaagttgccctttaaaatttgttacataaccaaattaccagtacagttattcgggttgaagcaaaaaatgactattctttgctggcttgcactgctgtctacgcttactgctgtaaatgcggtcaatatattggccgtgtttcctacgccagcttacagccaccatatagtctacaaagtgtatattgaagcccttgccgaaaaatgtcacaacgttacggtcgtcaagcccaaactgtttgcgtattcgaccaaaacttattgcggtaatattacggaagttaattccgacatgtcggtcaagcaatacaagaaactagtaacgaattcggcaatgtttagaaagcgcggagtggtgtccgatacagacacggtaaccgccgccaactacctgggcttgattgaaatgttcaaagaccagtttgacaatatcaacgtgcgcaatctcattgccaacaaccagacgtttgatttagttgtcgtggaagcgtttgccgattatgcgttggtgtttggccacctgtacgatcctgcgcccgtaatccaaatcgcgcctggctacggtttggcggaaaactttgacacggtaggcgccgtggcgcggcaccccgttcaccatcctaacatttggcgcaacaatttcgacgacacgaaggcgaacttgatgacggaaatgcgtttgtataaagaatttaaaattttggccaacatgtccaacgcgttgctcaaacagcagtttggacccgacacaccgacaattgaagaactgcgcaacaaggtgcaattgcttttgctgaacctacatcccatatttgacaacaaccgacccgtgtcgcccagcgtccagtatcttggcggaggaatccatcttgtaaaaagtgcgccgttgaccaaattaagtccggtcatcgacgcgaaaatgaacaagtcaaaaagcggagcgatttacgtaagttttgggtcgagcattgacaccaaatcgtttgcaaacgagtttttttacatgttaatcaatacgtttaaagcgttggataattacaccatattatggaaaattgacgacgaagtagtaaaaaacataacgttgcccgccaacgtgatcacgcaaaattggtttaatcaacgcgccgtgttgcgtcataaaaaaatggcggcgtttattacgcaaggcggactacaatcgagcgacgaggccttggaagccggaatacccatggtgtgtctgcccatgatgggcgaccagttttaccatgcgcacaaattacagcaactcggcgtagcccgcgccttggacactgttaccgtttccagcgatcaactattactggcgataaacgacgtgttgtttaacgcgtctacatacaaaaaacacatggccgagttatatgcgcttatcaataacgataaagcaacgtttccgcctctagataaggccatcaaatttacagaacgcgtaattcgatatagacatgacatcagtcgtcgattgtattcattaaaaacaacagctgccaatgtaccgtactcaaattactacatgtataaatctgtactttctattgtaatgaatcatatagcacacttttagttacgtcaataaatgttattcatcattatttacctggtttttttggtttgtgcgactgcgcacttcccagcctttataaacgctcaccaaccagagcagtcattattgtgccaggacgttcaaaggcgaaaacatcgaaatgaattctgttcacacgcgcttatgtgccagtagcaaccaatttgctccgttcaaaaagcgccagcttgccgtgccggtcggttctgtgaacagtttgacgcacaccatcacttcgaccactgttgccagtgtgattccaaaaaattatcaagaaaaacgccaaaaaatatgccacataatatcttcgttgcgtaacacgcacttgaatttcaataagatacagtctgtacataaaaagaaactgctgcatttgcaaaatttgctaaggaaaaagaacgaaattattgccgagttggttagaaaactcgaaagtgcacagaagaagacgacgacaacgcacagaaatattagtagtaaaccggctgctcattggaaatactttggagtggtcagatgtgacaacacaattcgcacaattattggcaacgaaaagtttgtaaggagacgtttggccgagctgtgcacattgtacaacgccgagtacgtgttttgccaggcacgcgccgatggagacaaagatcgacaggcactagcgagtctgctgacggcagcgtttggtccgcgagtcatagtttatgaaaatagtcgccggttcgagtttataaatccggacgagattgctagcggcaaacgtttaataattaaacatttgcaagatgaatctcaaagtgatattaacgcctattaatttgaagggtgaggaagagcccaattgcgttgaacgcatcaccataatgccatgtagtttaatggatactgagatctgtttaaatgttagatgtcgttctccatttgccaaattcaaagtattaattattgtcgatggatttgatagtgcttatattcaggctaccttttgtagcattagcgatagtgtaacaattgttaacaaatttaacgaaaaacatgtaatgtttgacgggtttgtaaggccggacgatgaaggtacaacaatgccttacgtcatcggaccattatattctgtcgacgctgctgtcgccgatcgtaaagtgaaggacatggtaaattcaattgaaaaccaacagacaatgttaaaagtatttattaacgaggctaatgtgtataacaaatggaatatgcttaaaggtttaatttataataataataacaatgaatctgttttagtgaataatgttgtaaaatttataaaggtagataaaaattataatgttactaaaaaaaataatgttactaaatgggttcctgcggttaattattttacgggtagacagctattaactattttatttatttttaaatttaaataaatgtattgttagaaagttgtgttgttttattagtataacgaaaaaatacatgacataaaccgcttccaattttggtcacacaaatttttgtgtggatagtttacgtaatgagttaaataggcgggcagttgtccgcgaaacgtgtcggtgttcaagtagatgcgcattaatttacgacaacccaaatcaggaccgcttatgtcaagtatttttttcacaaaattggtaatggtttcgttttgttccttgtacaaatacatgtcggtgagatcattgacacacgaattgtacgattccgccggcaggttggcaaacaagcgcttgagatgattgagtctgcgtttaattttataatcaaacttgttggtgaaaatgtccttcagcaagcacattaactggtcgttcaaaacgcgttgcaacgacgacaccaacacgtgatattcgtttccaagaagcgaaaaatttttgatgcagcggtccgcgttgaagggtcgtttcataatgcgcacgttgacaaaaaacacgttgaaagacagcggggctgtggttattttaacgcagttgtcggtatactcgtcgacgccgtatgcgcttgttatatcaatttgtagtgcaaatctaaccaaatcaaactcatcgttgtactgtgtttttatgcattttatatggcggtttaagtgcaaatcgatttgaccgtttagtctataggctccgttttgataacatttcagcattaccaacggatttgacatgtaaatttgacgcgttaacacgtccaattcagcgtaatgttggtcgacgcatttttgtaaattagtttgcaggttgcaaaacattttttttgagcaaaggccgtaataatcaaaatctatgcattttaatgcgcttttgtagtcgtcgtcgtcgatatggcatgtcacagccgcgcctccagttaacacgaataaacctccgttttcgcaaactacggcttcgaaacaatctttgataaatgccaactttgctttagccacaattttatcgcgcaagcgatcttcaatatcctttgtcgtaatataaggtagaacgccaagatttagttgatttaacaaacgttccataatgaatagcggcgacgacgacgcaacacgactacactattcaaacgcgcacgcaaaacaaacacttgcaactttatttgccaatcgtaatcacagtagtttttacgagtatgccatcacgtttgtaagcacattgctttttaaaaataatttaaatttaatggtcgcgtgcaatttgattaacacgttgattaactttgaaatcaacgtgtttggtaaaagtttattgctaagtaaatttgttaatttttgcattgctaacagcgacggggttacgattcaacataaaatgttaaccaacgtgttaagttttttgttggaaaaatattattaaaaataaataaacttgttcagttctaattgttttattttttatataataatactacaattttatttatacattaatactttggtatttattaatacaattatttacaatactctctatttacactataatactttattacattaatactttatataatcaaaaataatactttatataatattttctaattataaacggatagttttctctctttaaatttacgctgcaactcttcgctaaaacacatgggcggtggagtgggaacgggtggagtgggaacgtgtgcagtgggaacgggtggagtgggaggttttacgggtgcagtgggaacgggtggagtgggaggttttacgggtttaacgggcgacagttctttggatttgcgtaacagtttgggcgaaaacgttggcgtgcgccgactaatgatttcttcgtccggcaacggaggctggcacattgtgcacgcgtccggtgtggtacacaaaactttcttgggcacgttgtacaccggcttgggcacgctatatgtgttgccaaaatagaactcgttgtggttgccgaacggagacgatggatgtggagatggcgatggctgtgaagtcaagtccgaaagcgcgataaaagacgaaagtgtttctgaaaccgaagtggtggtggtggtagaaggtgtaaaaggcgggtgcgttacggcagccacgctgctgctatttctgccttcggaaaccacttccagcaatttagagttactttctcgttcttcttcgaggcaatagtcaatgtcgcaataatgatcataagatgctttttcggcttcggcgcgcctttttatgtatatgttgcgacgcatctcttttaattgcacgtacaaattccagcattgcacagctagtatcgtaagcacgcccattatgattacggaatagttttgattaaacacggtcggctcgtgatcccttacaatcgctcggcacatgatgcattttttgtaaaggttctcatacacacagttttggctcaagatttcggcattttcgtagtcaatttccaaatacacgatagagttccagcacaccgattccaaatcgtagtgacgatataaaacatctagcgtcggtagatgaccatttttgaacacgtagatttgaaacgcggcaaacagcatccaacacagcccagtgatcacgtttaccataatacacgtgatagcgacgtaaaagtttttttccgcattgaaatttacatttgtgtttgaagagccgatgcgatttttcgtccacacgacaatcttccatacaaaataaaacgtgtaaaataatatccacatgccgaacgacagcattatcggtatagatagattgataaccgatcgctttccttcaatttccagcaaaaacgcgtatctgttgtccgccactcccattatagataacacaaacactatcagatatgctaataataatgaggcattaagtccgaattgtaaaactgcagtggttttatttaacattttgaatatttaattcaacaactaagtaatggcaatatgtatcgaatactaatcgtggttttcctgtttgtatttctttatatagtataccagcccttttatcaggcatacttacatatcaaacgtgcccaacaaaaatacaatgacacgttggacgataggatggattacattgaatccgtaatgcgtagaaggcactacgtgccgattgaagcgttgcccacaatcaggtttgataccaatctcggcacgttggccggcgacacgattaaatgcatgtcggtgcctttgtttgttagtgaaattgacctgccgatgtttgattgtagtcaggtatgcgataacccgtcggcggcgtatttctttgtcaacaacacggacgtgtttgtggtcaacggccacaaactgacggtgggcggatactgctccactaatagtttgccccgcaattgtaatcgcgaaacgagcgtcattttaatgagtctcaatcagtggacgtgcatagccgaagacccgcgttactatgcgggcacagataacatgacgcaaatcgcaggccgacaacactttgaccgcattatgcccggacagagtaataggaacatcctgtttgaccgattactaggccgagaggtgaacgtggccactaacacgtttcgccgcagctgggacgagttgttggaagacggcactagacgtttcgaaatgcgctgcaactcccgagataacaacaataatctcatgtttgttaacccgcttaatcccctcgagtgtctcccgaacgtgtgcactagtgttcgcaacgtgcacaccagcgttagacccgtctttgaaacgggcgaatgtgactgcggcgacgaagcggtcacgcgtgttacacacattgtgccgggggacaggacctctatgtgtgccagtattgtagatggcctggataaaaatacggcatcgtatagatatcgcgtagagtgcgtaaatctgtacacctctattctaaattattctagtaacaaattgttatgtcccagtaacaattttgatagtaacacggacgcagcttttgcctttgaagtgcccggctcctaccctttatcgggcaacggcctcaacgagccaacgtatcgcttttatcttgataccagatctcgagttaggtacaatgacgtcagagggcagttatcttaattatgataacacaaacaataagtcgtttaaatgttacgtcagtagttagtatataagccgtacatgttggcttgctaattcagtcaatatcagacgtttatcatggacggtgtaaagttgctggggacgtgcgcgctaataattttgttatcgacgacgaatacagttgtcggtcgtgaccgtatcacgtttacgccgatagaagatagcgcaggcctcgtgtttgaacgcatgtacggtttgcgacatcatacagacgaaagatttgtgtttgtgaaaaaattcaattttgcttcggtgctgcaagagctcaataatatcaaatctaaaattgaattatatgaagcgcaagtttcgacttgcaaaaacgtcagacaaataaaacaaaacagatcgagtaacatcaaaacccgcattgaaaagcagctgcagtttttgacgccgcttaacaaaaatttcatcacatactctgtggaagacagcatttcaagcaacgaagtgctggacaacatcgatttggaatatgacgacggcgttgattttgacgtttacgatgaatacgaaccgtcctcgcattggagcaacatgactgtatccgacgcgaaagctttgctccaaaacccgcccaaagaccgagtaatgtttttggacacggtcaccaccaacaacgtgagcagcaaatacgaagaatacatagactgcattgtgagcaaccgtaccgttgaaaacgagtgcatgtttttagccaacatgatgaacgtgctcaacgacaaattagacgacgcagcagctttggccaaaatgctgaagcgaatagtaaaacaaacgcgaaagaacaaactcaacatttccaacacggttatagacgacgacacgctgctaacggaaatgaaaaaattagtgcaaattttatacaaccaaaaccgcatgtgggtagtggattttaacagagacatgaatagttatttcgatttgtcgcaagcgtacaaattgcatttatatgttgatttaaacacggtcattatgtttattaccatgccattgttaaaatccaccaccgttccgtttaatttgtatcgcgcgatgacgctgcctttttgcaggggcacaatgtgtttgcttatcatttcgggcaatgaatactttgggattacagacagcaaaaactattatgtgcccgtatctgataactttagacaagattgccaagagtttacgggctacaatgagtttttgtgtcctgaaaccgagccaattgccactatgaactcaaaagtgtgcgagattgaaatgtttatgggccgatatagagacgtcgtgtacggcatgtgcgacattagggtggccaattataatccaaaaaaagcttacgtgaacactttagtagactaccgaaaatggttgtacatttttccaaacacgaacgtgtccgtccactattattgtaaagacgcgcttgtacaagttaatacaaaagttttgcccggcgttggtgttatgttttcgactatggagcaaacgtgttcgattggaataacgcatgatgtgaccataactgtagattcgcgattttatgtcagccattcaactacatactggcctaaaaagaaatttaattttaacaactacatcgaccaaaatatgttgcttgaaaaagcaaccaccgccagttttatacagactgttgacaattttacccgtcctgttttattgcaactttttaataaatttcacattgaagattacacatcggcgtctcagcattctttccatcagtctaaaatttacaccaacagcgcgacgcccgacgaagactcgcaagacgacagtaatatcaccgtggtaataattatcgctattgtcgctgcaacgttcctattctgtagtttattgttatttttgttttgctgtataaaaaaacggtgtcatcaatcaaataacgtaactgtgcaatacaaaaataacgatgaatttgtcacaatttgcaataatttagaaaacaatcgagcatacattaatttaactaatgaatacgatgatagcgatgatatgccaaaaccattggatttgttaaaagatgataaacctctgttgtatcctatgattattgaaagaataaaataaaacatgtataattaaaatatattttttatttatatactattttctattaaatattccaatgcacacaaatgtttaatagctatcagttttaattttactaattcgtctaaacaaaaattattcacttgctgtttttcatccatttgacatatggcgtttataaataattcgctgtgttttatgaatgcatcgtaaaccgctggctgggcctttagcacggttggcgcattgtatctttcggtaaagtacgcaatatttttagtcaaacacagagattttaaatcttcttcatttatatccaagtcggaacaattgtatacaaattctagcttttcacttttgggcgcgtctaaatattggtttacaagttcgagttgttccacttgacccttgatatcggccgctatgcacaacattttgtcaattgcagtttcattgtttttaacatagtaatttttaacttttttattttgcaatgtgatcaaactatttaaatttgcttgattttttttacaaaacgcagttaatatgcaagacattttgacttataataaaaaacaacatttttatatattcatttattgttcaataataacaaatattccaggtttaaaagctaacgaatagggcttttcggtaatttttttattattcatgtccgtcatctgcatttctttgccgtacttgacgccgtcaatggtgcccatcatgtacattttaatttcttccgaaggtccgtctattttgtccatttcgaacaatctatcaaaatcttcaacgctcattctctgcatatcaagaggaacgtttctgatttttccggtggcgtaaattgatccgttgttgtcgcggttgattatgtaaaaccgacgaatcaacatgtcgcgttcgctagttttgttcttatccggcaaatgaatgcacacgtttggttccattttcaaaggaaaatcgctttgcaagtgtctttgcaaaatgttgccaaatatattgttgtgtttgtgaatgtctccgtattgaatgctaaaaaactggccaaagttgcttttggcacgttttatggttccaaagtcggaaaaccaaaatccgcagggcttgccctgcactcttggaccgatggtgtacgtagtcttgccgttggccggctccaacaccacgatatttttatcgggctcgggatacaacttgtcttcccattcgtgcaaactattcaaattagccagtcgacaaaattcgtttttcaaaaatctgccttcgaaacaactacaattcagtattgaaaagttgcctcgtttcacattaatcgccatttgctcctgccacaacatctttgtcaactcgcgtggctccaattgaacggacgacggcgtaaaatagcacattacgcccgtttcgtcgtgtttcacgttaaaagccgccccgttgttgttgttgtacggcaccagctgctggtcctcaccactttccactctttcccgctttggctggttgtcgtcgctgctcgaatcgccaatcttgcgtttagttgccatgctaccgacgtgcgctgtctgctgtggttcaagtctaattgaagtgtttcacagaatataagatatataataaatatggacggctctgttgttagcatgtgcgtagacaacgcgtttgcgtacactactgacgatttattgaaaaatatttcttttagtcattccaaatgtgcacctttcaagctacaaaattacaccgttttgaagcggttgagcaacgggtttatcgacaagtctgtggacgtgggctctatcagcgagttgcaaaagtttaattttaagataaatcggctaaccagctacatatcaaacattttcgagtacgagtttgtagttttagaacataatttatccacagtgcacgtcattaacgccgagacaaaaactaaactgggccatataaacgtgtcgctaaaccaaaacgacccaaacgtgctcattttaaccgtaactttaacgagttaaaatgaacgaggacactcctccgttttattttatcaacacgcgcgacaactttcgcgacaacatcgccgaacacgtattcgacatgttactagaaagacatggctcgtttgaaaattatcccattgtaaacacggcgtttatcaacagcttgatcgttaacgggtttaaatacaatcaagtcgacgatcacgttgtgtgcgagtattgtgaagcagaaataaaaaattggtccgaagacgagtgtattgaatatgcacacgtaaccttgtcgccgtattgcgcgtatgccaacaagattgctgagcacgaatcgtttggcgacaacattaccatcaacgctgtactagtaaaagaaggcagacccaagtgtgtgtacagatgcatgtccaatttacagtcgcgtatggatacgtttgttaatttttggcctgccgcattgcgtgacatgattacgaacattgcggaagcgggacttttttacacgggtcgcggagacgaaactgtatgtttcttttgcgattgttgcgtacgtgattggcatattaacgaagacgcctggcagcgacacgccaccgaaaacccgcaatgttattttgtattgtcggtgaaaggtaaagagttttgtcaaaacgcaattactgccactcacgttgataaacgtgacgacgacgacgacgacgacaacaatttaaacgagaacgtcgacgacgacattgaggaaaaatacgaatgcaaagtctgtcttgaacgccaacgcgacgcagtgcttatgccttgtcggcatttttgtgtttgcgttcagtgttattttggattagatcaaaagtgtccgacctgtcgtcaagacgtcaccgattttataaaaatatttgtggtgtaataaaatggtgttcgacgtgtactacaacggctattatgtggaaaaaaaattctctaaagagtttttgattcatattgcgcctgatttgaaaaacagcgtcgactggaacggcagcacgcgcaaactgctgcgcgttttaaacaagcgtgcctacagacaggtgttgcagtgcaacggcagatactattggcccgatggcacaaagtttgtttctcatgtgtacaacagatctattcgcacgcacagcacaacagtcaaacggaccgacagctcgcatcgattaaaaagccaggtagtcgacaaacggccgcgccgttctttagattctcctcgtttggacggatatgttttggcatcgtcgcccataccacacaccgactggaatgaagaattaaagctgtacgcccagagccacggctacgacgacgacgacgacgatttagaagatggcgaaattgacgaacgtgactctttaaaaagtttaaataatcatctaaacgacttgaatgtattagaaaaacaataaaacatgtattaaaaataataaaactttattttgtaatatataatgtattttatttaaaaaaacatgtattaaaaataataataaaactttattttgtaacatatataatgtattttatttaaaaattatttattccgtaattaagaaaattttgtcttgacttcataactcttttttccatattctgcagctcgtttacgttttttgtgagacttttaattttttcaaaatgctggctgtcaatagttattttttgtttatgtctattaatttcttccaatttagattttaaatctcgttgagattgagatgcgttgtaattctttgagaacatcttgaaaaaatatacagatgaagtaaaacagcatctttttatccaaattaggagttaattattattcatttgtatcgcgaccatttgctcgtacacagtttccataaaatagttatttttattgcgataagtgttggcattgacatttttcaagtgtcgtaggttaaaagggcaaatgggctgcgtggccgataaaagattccagttcaacagcccctcttcgcctccgtttaacttgaaaatggcgctgcatgtttctacgttatcgtgttcttgttgagtggcgcacggtttgaccaatatcatcttgtgatatgcggttttgacattcatgttcaacggaataatttgcgggtcatcgcattcgtcggaattaagctttaaatggcgtccgtatgctttccaaagtttttcgtcgtcaaaccgcggcactgcttgcaaatcgacgcggggaaacggcgctctgtacaaaacgcctaaattcaaaaattgattgcactgttgcagttctgtccaatcgacgcgatttttgtaattttgaaacagcatcaggttaaacgccgcgctggcgcgcacgtttgtaatcacggtgtaattgattagcttgcgccaatattggtcattgaacttttcttcaaactcatttctaaactctggatgcgcaaacatgtgtctgatgtagtacgcgggcggggcgttaaacgcagtccatttgtcaatacacttccagtccgaatgtaacgtgttcaccaaaccaggatattcgtcaaacacgagcatgtgatccgaccacggtatgctgtgggcgatcaattttagttcttgcacgcggccttcacgtaagcaatacaaaatgagcgcgtcgctgatcttgacacaatcttgcatgtacgcggacaaattaacgttttccatacagctcgcatcgtttattagcgccgcgttcaagtgcttgtatttgaacacataatcgtagtcgatgtactgtttaatgggttctttaaaccattcttttagtagtatgtgactggccactatgcgtttccaatttaatttgtgtgcgtatttttgctgcaccgacaacacgaggttattgtaatttttggatatttcttccatgtccaacaagtcgccaaacgcgagtataaaatcttgcgtcaaaaatttttgctcagacaccaacgaccaaatcaaatgcgatttaaacctgttggcgattgttatcgacaacggcaaaattgaaataattttccaatccaatttgttgcgaaacacgtgaataaaatcggcgcgtccgtaacattcgcgcgatatgcgcttccaaaacgtgtcatcttgcaaattgagcaaatagacacgattgttgggagatttgacggccaattcaattatttttatatattctttttgctttaaagcgcgttgtagcccttgggttggagccatgtcgttactacaatatgttatacacataaataaaaaaaatcaaatggaataaagtattttattacaagttaaaattgttattcaatcgtgcaatctgacgttccgtcatgctcgactgcacggcatcgatgagctgttctcgagtcaagttttgcaacagcgtgatcttgttgtgcttggctttgtactggtttcgaggcagcgtttctttaactttgttaagcacgttcatggcgttgggcacatagtcgctgctaaataccacgtcggacgaacccaagcgtttaatgctacggttaagactgcgcttttgcgcgcgcagaaacgcatacttttctccgcctaacgcacacacggccaacgaatgtagcagttggggattgttaggtttggctatcacgtcttgcgcaatgtccgccatgcggttggccagctgcgccgtttcgcggcgcgcctcgtttaacattgtgttagcttgcaccaatccggcgttggcggtcaccaacgcattggcaaaatgtataattttttcgttggcctcggccagactttcgctagcaaacgccaactttttatttaactcttcaatcacaccataatttgtgtccatcttgacggccggcgcgtacttgcccgtgcacagcacctgcggaatcacctcctccagcagccacgcctgcaattccacagcgtaagggagcttgctcttcataattagttggataacaccctccttggtgatgagcactgtgtgcggctgcaggtacagtgggtcaccttgcttgaccacgttgtctggagccggggtatatggtatagaccccgactcgctgtacgtcgttttgtattttttgtcaacattaactatcacagcttgtttacaatttacatattttaaactgctggcgatgtctttagccacaaatttgacttgcaggtttccttgctcgagcacgtatcttaacgtgaacgtgtcctctccaaatttaaattctccaattttaacttgagccattttaatttattaaattaaatttattaaacacgttgtaactcgttgaaggttcgacgcaaactaaacgctgcggccgtgttaataaacttggttaagaagggtcccgctgagggaccctttcaattcatcaaacttggttaaatcccgtctcctcttttcaagacgctgttgggagtagggtgactgtttgctcaaaattaaaatggtgtaattaagaaacaacatgaaagccatttgcatcattagcggcgatgttcatggaaaaatttattttcaacaagaatcagcgaatcgaccgcttaaaattagcggttatttgttaaatttgcctcgaggtttgcacggctttcacgtgcacgaatatggcgacacgagcaacggttgcacgtcggccggtgagcattttaatcccaccaatgaggaccacggcgctcccgatgctgaaattaggcatgttggcgacttgggcaacataaagtcggttggctacaattcgctgaccgaaataaacatgatggacaacgttatgtctttatatggcccgcataatattataggaagaagtttggtcgtgcacacggacaaagacgatctgggccttaccgagcatccgttgagcaaaacaaccggcaattctgacggccgtttgggatgcggaataattgccatatgtaaatgatgtcatcgctttaactcgctttacgagtagaattctacgtgtaaaacacaatcaagagatgatgtcatttgtttttcaaaactgaatttaagaaatgatgtcatttgtttttcaaaactgaactggctttacgagtataattctacttgtaaaacataatcaagggatgatgtcatttgtttttcaaaactgaactcgctttacgagtagaattctacgtgtaaaacacaatcaagagatgatgtcatttgtttttcaaaactgaatttaagaaatgatgtcatttgtttttcaaaactgaactggctttacgagtataattctacttgtaaaacataatcaagggatgatgtcatttgtttttcaaaactgaactggctttacgagtagaattctacgtgtaaaacacaatcaaaagatgatgtcatttgtttttcaaaactgaatgatgtcatttgtttttcaaaactgaactggctttacgagtagaattctacgtgtaaaacacaatcaaaaaatgatgtcatttgtagaatgatgtcatttgtttttcaaaattaaactcgctttacgagtagaattctacgtgtaacgcatgatcaaaaaatgatgtcatcttttacacatgattataaacgtgtttatgtatgattcatttgtttttcaaaactgaactcgctttacgagtaaaattctacttgtaacgcaagatcggtggatgatgtcatttatttgtgcaaagctgatgtcattttttgcacacgattataaacacaatcaaataatgactcatttgtttttcaaaactgaactcgctttacgagtaaaattctacttgtaacgcgagatcggtggatgctgtcataatggcccaaatttttatataaaggggccactttgctatggggaattaaaattcgtcatgtatcgtttgctggcacttgtaactctagcctctatggctgactgctcagctctgctgacacacatcacgggcacgtctattcccggccggctgtttattaaccggcggtttttggcagtaaatccaaacggaaccgtttacggcggaaccattgaatcggacaacgccgacaccacattcaagcgccttgccgttgacagaaatcgcatcgtcattcaaaacgccattacgtgtgtgtacctgtgcatagaccggtgtggccaactgtacggatcaaaaactttatccgatgattgctttatgagggaaattatggaaaaaaataactacaatacgtattataaaatgtacgatcgcaagttgacgtatgtggcactgaagaacgacggtactccccgaaaactacagatttcaaagggccgcaagctgggcaagtttagcgtgtacgccatgactttattgaaacgcttaagttttcctatatacacgtcgtgtcctaatataaaaaatgaaactattgttcaacatcgtaaatgtcatgtgtaatcaatgtgtattttacaataaaaacatttttatttaaataattattttattttagtaaatgacatcatcccttgattgtgttttacacgtagaattctactcgtaaagcgagttcagttttgaaaaacaaatgacatcatttcttaaatttagttttgaaaaacaaatgacatcatcccttgattgtgttttacacgtagaattctactcgtaaagcgagtttaaacaaatgacatcatttcttaaatttagttttgaaaaacaaatgacatcatcccttgattgtgttttacacgtagaattctactcgtaaagcgagtttagttttgaaaaacaaatgacatcatttcttaaattgagactagttaataatttgtgtgatcagataactattaacgtccacatggtattttactcaaagtccatcaattcgtatgcgtttgtgtccaggtcgggcgttgaaaagttgtagcttgccattagatcggatagcgactcgaagtttgtgagcgtttgcagcgcaagtttggcatcttgtttaaaattacacgacgacagacagtaaaagtattcttcgacaagcatgactacacccatatcgctgtttaaatgctcgacgtagttgttgcatgctatgtcgcgtgtgccccgatacgcgtggtttcggtgaaaatcacaccacagccaatcggcgtgcgtgtaacaaagtcgacagcgaaacaatttatcgttttccaaaaaattcagatattcgacagttttgcagctgagattgcgcgtttgattcactttaaaatcgtcgtcagcttctataatttctggcaacagtctgccttgttgccccattgcatcgatcacctcgcccaagtggcccggtgttatattaagtcgtttgaaagcatctatcgcttcttgcacgtcggcctgataatttttgattacgggcgtggaaatcaattgccgttgaagggaaataattcgtggtgtgggtatcggccgcctgttgcacaattccaccatcggtggaggcaagggcacattcacagcaaccgttgtcatttataagtaatagtgtaaaaatgcaaatattcatcaaaacattgacgggcaaaaccattaccgccgaaacggaacccgcagagacggtggccgatctcaagcaaaaaattgccgataaagaaggtgtgcccgtagatcaacaaagacttatctttgcgggcaaacaattggaagattccaaaactatggccgattacaatattcaaaaggaatctactcttcacatggtgttacgattacgaggagggtattaataataataataataataataataaaaatcattaaatgtacaaagttttttatttattctgacatatttgtatcttgtgtattatcgctaaccattaaaagtgttggagccgcagtagtgttgcggcgattttttatagaagatcgttgtttggccggaactgagttttttcttttcttgctgccgctaatcgaagtgggcacgtattctgtagtagacggtgcaacgggcaacttgagcgctaccgtcttaaatttagccatatttttagtgatgaaatcgcgcgttaacacttcgtcgtaaatgctactcagcagaggcgcaacattgttattgaatgtctcgtttaacaagctgtaaaactccgaataaagcttatcgcgcatttcgcagctctcttttaattctgccaaatttgcgttggtaagcaccgcagtctgtctttttttgctcgctggaattgctgcgttgtcgcttgaagacgacgatgtcgatcggtcggccatttttttacccatcttttcagtgtgatcaaaaatgaacacaaaatctgccaattcgggcgtgtttttcaccaaatcccacatggccgggctactaggccactcgggctgcttgatcttagtgtaccaactgttaaacaaaatgtatttattgttgttaatcaccttcttcttgcgtttggacattttgcgttcgtcctgcatgacaggcattacgttgaggatatagttaatgttctttttttccaagaaatttacaatagcaattagctggtccatgttggatttgttgtaagagctcgattccagtttattcaacaacttttcatttttgcacacggccgcagtttctgtagaagattgttgctccggcatgtttaccatgtttgatttttgtaaacctttgaaacgacccgcttgtattcttgatgatatatttttttaatgcccaacagcctggcaattcgtttgtgatgaagacacaccttacgcttagaacatttgtcggtaattactgtgaaatggcctaaattagctcttatatattcttttatacgctcaaacgacacgatgtccaacatgtgcgcgcagacgtcttctgtattcattgtgtgcttgagcgtgttgatggcttccctgaacagcgcttgtatttcgcttcgggtcaagcagtccgaattacacccgcctaagtgcgtgcaatttttggggggcatcgttgttgtctatcttttttagagtggcgtagaaaaagtcttgcaattgcctattatcgaaacgcttcttgatgctgcgcacaaaactaaaaaattcaatgtaattgctgtaatcgtacgtgatcaattgtttgtcgttcatataattaaaatatttgttgagcggcacgatggccaggctgcgcgttatttcgcaattgaagcgtcgcggttttaacattatacgatagtcgttgccaaacgtgcccggcaacaacttcacggtgtacgtgttgggtttggcgttcacgtcaatcaagttgccgcgcacgacgcctacgtatatcaaatacttgtaagtgacaccgtcgtctttccattgtaacgtaaatggaaacttgtagatgaacgcgctgtcaaaaaaccggccagtttcttccacaaactcgcgcacggcagtttcgtaaacttttgcgtcgcaacaatcgcgatgacctcgtggtatggaaattttttctagaaaagtgtcgtttatgtcggcggcgggcgcgttcgcgctccggtacgcgcgacgggcacacagcaagacagccttgtccggctcgattatcataaacaatcctgcagcgtttcgcattttacatatttgacacttaaaaaattgcgcacacgagcaccatcgtttaatacctgattgcaactatttacaatttatcacatttacgttgaacacgttttaattttttagatccgtctttgttcagttgcaagttgactaaactacaaaatttttcggttctgcaaaaccgcagctgctcgttccacccgttgtatttgaaaaaacttttttttatgcggcgacaactgcttttataatattgcccaatgtaaacatgcaaaattttgttgctctcgtcaaaaccgcggttggcgttccattccataatttttttattattcatcaacgatggccattgtaaattgtcgtcatttatacgcatcatatgatttaacaaaagcttttcgtatagcggaacttcaattcctttggaacatttttcaaacgataatctaattcgtttctcggttggcagcatttcatgcttgatcaacaatcgcctgacttttatggccacgtttatgtctttgcacaacaaatgtgggttgtcgacaatgtaatagtgcaaagcattcgttacggcaaatgcgtagtttgatttgacgacgcccttgttcttgacgggcattgcggcttttaaaattacttgcaagcattttatgaacacctctttgtgtttaaacaataacatggacaaacatcggcgaaacagtttgtaataattatgaaatcccaaattgcaggttttaaacttctttgttacttgttttataataaataaaatttgctgacccatgtctgcgcccgcaactttaattaaccatttgtgcgcgtattgattgtctcgtcgttcccaagcggaaaattgattgatctcgagccaccggctttggtctgataccgccgttaacgccgacgacgttcctgtttgtttgattacgggttctaaaagacgaaacagcagcgcaaatttgtttttgcgtcggtagtattttggcaggcaataatcaaaaaaatccgtaagcaattttctgcatctattaatattcgttgcgtacggatcgagtttttcaaaaattactttgtttgtatgaaaataacgtttgggcttctcacaataataatcttcgttgtagaacagaaagggtttgcgagaattggcacgtttgtccatgattggctcagtataacgactggtcaaaattgacaacgcgtttgccgtaatgtgcaccggttcgcacacgtttgccgcgtatgtaatccatgtttatttcgctgtcgcagttgattacacgattgtgttgagcggcgcgttttattgaatttaggcgacgcgtcgacaattccaaaggattgtaaagcgcagatttctccagagtgaacgagtttaagtggccgccgttgaaccattccagagccacgattgtgtacagcaaaaagaatatttctttatcggcgctttcaaacgcaaatttgttttttagacaatagtagtaaaattttaacgaattgtataaataaaacatgaaattgccatttttaaagtaaaattctacatccgtgacgaacaaaaggtttactattttgttctccaacatgtgtgccaattttctcaagtacaccattgaatttttgtcgtcgtccatctcgatcaacaacacgtacggcgttttagaatttaaaattattctaaaattttcctgttgcaacgattccacagtgtccgaccaatatgacgctgctacttctagacagatgtactttttggaaaacacgtgtcgtttgataacctcgctaatggacgtgatcgattgtaaatacttttcaaacgtggcgtcttcccaaccacgcaccgacacgggcgctgtcgtgtcgggctgatgtttgaaatccaaaccgctctgaattaacttggttgtgattcgtatgctcaattgttgacccaacgtgtagtgattttcgtaggcgcgctcccacattacgttacacgcaaatttgacgagatcatcaacgtctttctgttgcaaaattctccgcaaacgcgccacatcgcccttgtaccaccgatctcggcacacaagctgtagcatttttaaatcgtgatcgctcaagctatcaattctggttagatttatatagtcgtcgatatcctcgggcgtggcttgcgtcatgtccgtgaaacgtgcaaaatcaaatatttttatgttgtagtcgaatctaagaaatccatcggcgttcacttgcacttcgcgctttacaaaacgaggtagcgtgtaatcgaacccgtttaaatagattgcgtacaaaaccagcacttcatcttccagtttacacgcttgcggcaaaaattgtgtggtgtgctccaaccgggtgacaaacataattatggaaaataacgcggaattctactcgtaaagccagttcagttttgaaaaaacaaatgacatcatctcttgattgtgttttacacgtagaattcaacagacgactagagtacgtaggcacaatcgccacaatgatgaaacgaacgttgaacgttttacgacagcaaggctattgcacgcaacaagatgcggattctttgtgcgtgtccgacgacacggcggcctggttatgcggccgtttgccgaccagcatttttgtatcgtttcgcgtgcacatcgaccagtttgagcatccaaatccggcgttggaacattttaaatttgaagaaagtctggcgcaacgccaacacgtgggcccgcgttacacgtacatgaactacacgcttttcaaaaacgttgtggccctcaaattggtcgtgtacacgcgcacagctaacatgtacgcggacgggttgccgtattttgtgcaaaatttttcagaaacaagctacaaacatgttcgtgtgtatgttagaaagtctggtgcgatacaaatagcgacattaccagtttacgaacaaattattgaaaatacagtaaatgaacttgccgtcaatcacgttgattagataatgtgcgtgttaaatgtgatattttagcgcaataaccgtagtttaatcgaagagaatagccgtctcgccacaatggataattacaaattgcaattgcaaaaattttttgaccaagcgcccgacaacgatgatcctaattttgaacatcaaactcccaacctattggcgcatcaaaaaaaaggcatacagtggatgattaacagagaaaaaaatggccgacccaacggcggcgtgcttgccgacgacatgggacttggtaaaacgctctctgtgttaatgttaatcgcaaaaaacaactctgtacaattgaaaactttaatagtgtgtcctctgtctttaatcaatcattgggtgaccgaaaacaaaaagcataatttaaattttaacattttaaagtattacaaatctttgaatgccgacacgtttgagcattaccacattgtggtgaccacgtacgacgttttattggcacatttcaaattaatcaaacaaaataaacattcgagtctgttttcaacttgctggcatcgagtcgttttagatgaagcgcatattatcaaaaactgcaagacgggcgtgcacaacgccgcgtgcgctttgaccgcaacgaaccgatggtgcatcaccggcacaccgatccacaacaaacactgggatatgtactcgatgattaattttttgcaatgtcgtccttttaacgatccaagagtgtggaaaatgttaaataaaaacaacgactctacaaatcgcataaagagtattattaaaaaaattgttttaaaacgcgacaaatctgaaatttcttttaacattcctaaacacacggtcgagtatgtacatgttaattttaatgaagaagaaaaaacgttgtacgataagttaaaatgtgaatcggaagaggcgtatatgaaagctgtggcagcgcgtgaaagcgaaaacacgctaagccgattgcagcaaatgcagcacgtgttatggctaatactgaaattgaggcaaatctgctgccacccgtatttggccatgcacggtagaaatcttttggaaacaaacgactgttttaaaatggattatatgagcagcaagtgcaaacgagtgctcgatttagtagacgacattttgaacacgagcgacgacaagataatattggtttcgcaatgggtggaatatttaaaaatatttgaaaacttttttaaacaaaaaaacattgctacgttaatgtacacgggccaattaaaagtggaagacaggattttggccgagacgacattcaataatgctgccgatactcaacatcgaattttgctgctttcaattaagtgcggcggcgtcgggttaaacttaataggcggaaaccacattgtaatgctggagcctcattggaacccgcaaattgaattgcaagcgcaagaccgaatcagtcgtatgggacaaacaaaaaacacgtacgtgtacaagatgctaaatgtggaagacaacagcatcgaaaaatacattaaacaacgccaagacaaaaagattgcgtttgtcaacacggtctttgaagagactctgatcaattacgaagacattaaaaaatttttcaacttgtagctggtaagtcgccatgaacacccgatacgctacttgctatgtttgcgacgagttggtgtacttgtttaaaaaaacgtttagtaacatgtcgccttcggccgctgcgttttaccaacaacgtatggccattgttaaaaacggtattgtgctgtgcgtacgttgttcgtcgaaactaaaaattaccaacggaatttcgattccaatttaccccaaccgccgcgctcaacaacatgcacgacggtcgcgttaagacgcaagcgcttcgagttttggctcgctcgctacctccgctgtacgactcgaccgtcgatcggcacggctgcaaggtgttcacggtgcggcgctacaacagacgtgtaattgactttgcgggcattcgcaacaaaacgctggaaatcattaagaccgacagaaacttgccgctcaacacagaatgcaatgtgaaggctgtcgacagtgcatgcatgcgttgcagaagaagtttcgcagtttaccccgccgttacctatctgcattgcggacattcgtgtttgtgcaccgattgcgacgaaacggtaaacgtggacaatacgtgtcctaaatgtaaaagcggcattagatataaattgaaatacaaaactttgtaacatgttgccctacgaaatggtgatttccgtgttggtttacttgtcgccggcgcagattttaaatttaaatcttcctttggcataccaaaaaagtgtgctatttgccagcaactctgcaaaagtcaacgaacgcatcaggcggctagcgcgtgacaacaacgacgacgacgactcctatttttaccacaaacagtttataaagattaattttttaactaaaaaaataataaatgtttataataaaactgaaatgtgtattagagcgacgtttgatggtcgttatgtggtcacacacgacattttaatgtgctttgtaaacaagagttatgtaaagcagttgctgcgcggggttgacacttgcattacactacagcaacttgttaaaatgtacagtccagaatttggtttatgtgtaaatagcaaaaatatgtttgtgttaactgaatcggtgttgacgtctatttctttaaaacactcgtttggcaaatgcgagtggttggacaaaaatataaaaactgtgtgtttacaattaagaaaactttgtatcaataataagcaacatacgacatgtctaccgtattgattattgtcgtagttgtaatatttttaatatgtttttggtgcctattaaatagtagcaataatagcaataataaaaatgatgccaatagaaacaatgtttttgttgatttcgatcccttgccgttcgatgcctttgatatcaatacctttgatatcaccaacgacgacagcatagtggcttttcagcaaaacaacattcaagaactagaaaactttgaacaatggttcaaaaataatctttcatattcgtttagccaaaaagctgaaaaggtggtaaatcccaatagaaattggaacgacaacacggtatttgacaatttgagtccgtggacaagcgttccggactttggtaccgtgtgccacacgctcatagggtattgcgtacgctacaacaacaccagcgacgcgttataccagaaccccgaattggcctacaatctcattaacgggctgcgcatcatttgcagcaaattgcccgatccgccgccgcaccaacaagcgccttggggcccggtcgccgattggtaccatttcacaatcacaatgcccgaggtgtttatgaacattaccattgtgctaaacgaaacgcagcattacgacgaagctgcggccctcacgcgttactggctcggcctgtatctgcccacggccgtcaactcgatgggctggcaccggacggcaggcaactcgatgcgcatgggtgtgccctacacgtacagtcaaatgttgcgcggatatttattggcggaaattaggcaagagcagggaatacaagaaatcctaaatacgatcgcgtttccgtacgtcactcgaggcaacggcttgcacgtcgattcgatatacatcgatcacattgacgtgcgcgcttacggctatttgataaattcatactttacgtttgcttattacacgtactatttcggagacgaggtaatcaacacggtgggtttgacgagagccatcgaaaacgtgggcagtcccgagggagttgtggtgccaggcgtcatgtctcgaaacggcacgttgtactcgaacgtgattggcaactttattacgtatccgttggccgttcattcggccgattactccaaagtgttaaccaaactctcaaaaacatattacggttcggttgtaggcgtaacagataggttggcttactacgaatccgatcccacaaacaacgttcaagcgcccctgtggaccatggcgcggcgcatttggaatcggcgcggcagaattatcaactacaatgccaacacggtgccgtttgagtcgggtgttattttgcaaagtttgaacggaatcatgcgaatcccgtcgggcaccacgtctacgcagtcattcagaccggccattggccaaacggctatagccaaaaccgacacggccggcgccattttggtgtacgccaagtttgcggaaatgaacaatttgcaatttaaatcgtgcacgttgttttacgatcacggcatgttccagctatattacaacattggcgtggaaccaaactcgctcaacaacacaaacgggcgggtgattgtgctaagcagagacacgtcggtcaacaccaacgatttgtcatttgaagcgcaaagaattaacaacaacaactcatcggaaggcaccacgtttaacggtgtggtttgccatcgcgttcctatcacaaacattaacgtgccttctctgaccgttcggagtcccaattctagcgtcgaactagtcgagcaaataattagttttcaatcaatgtacacggccacggcttcggcctgttacaaattaaacgtcgagggtcattcggattccttgagagcttttagagttgattccgacgaaaacatttatgtaaacgtgggcaacggcgttaaagccctgtttaattatccctgggtaatggtcaaagaaaataacatggtgtctttcatgtcggccaacgaagacactactatacaatttagcgttataatgaattcttttacctctatcggcgaaccagctttgaaatactctccatcaaattgctttgcgtatggaaacggtttcaaattaaacgacagcacgtttgatttacaatttatttttgaaattgtgtaatacatttagggagaatgtaatattcaaaagactgattgttaacacaaaagactgatattgttgttgttgttgttacaaaatagaaaataaaaaatatattaaatattatttattaaactgtttaattttaatgctaacgcgtacaaatcacgctgttccgccgtggacatggaattgcgcaaaaaagtcttgacagtgtcgatttcttcgccatcatcaatttccatatatttaatttcttcctcaatttgcatttccaagtttgcgtattcttgcaaataataatttagtcgttgggcgacctcgccaatttttaataatacattatccgacaataaatgccaacgagttactgtgcgttctatcatcctggcactttttaatgtgaatattaaaaagttgttgcatacatatatatatatcgttaaacgtttatgtttactttcacgttagcttatttcattgatataaacatttagttttataacagcgtcggtaattttattttgaccaaaatcaaaggtgtcgtcttcgacgggtacgattattattttcccattgacacactgttttcgtgcacagatataattttatcatgtttgcaatcgtgcaagagttatcaatttttcattatcgtattgttgcacatcaacaagctggacatcacgttaaactcgccgcagttttgcggcaagttggacccgccgcgcatccaatgcaaactttccgacattctgttgcctacgaacgattgattctttgtccattgatcgaagcgagtaccttcgactttttcgtgtccagtgtggtttgttttaataaattctttgaaaatattgtcgggtgtattattaaatagcatgtatggtatgttgaagatgggataacgcttggcgtgcgggtcgtcgtgatttccaccgcgcaccacatatttgcgctcaattttatcaaaattagactggcgagacaaaaacgagacgggcgacaagcatatttgggcgtgcgtaccatcttcggccatccactcggtcaggtcttcgccgccgttaaacacacctttctgaccgtgaatgccacatatttttattccttccaaatcgttggtggacgtgactatgactattttaagcataacgttgtcgccgttaaccaccatgctggcgtcgagtttttcaattttttgatttttaatttgtctaaagtaaacgtacactttgtaaacgttaaaattgccgttggtgcacgtttcaattttgtaccgtcggccgtcgtacacccaattaatttttgcgttgctcaccagcacaccggccatgtacagcacaagtccgtcgtctagcgcaacgtaattcttgtcggtactattcgtaaattttactaaacacgactgtttagggccgaccacaagcttgcccttcaacttgttcactttgttgttgtataaacaaatgggcagcgcaatgtgcggaatgtacggatcttcggcggtcatgagtttattgtctcgcaccaacgtccacaatttaaacattttattattgagcaaaatggacttgttcaccgccacagagtagccgtttggtaaacccgatacgcaactattttctttgtactcaaacacgggcatggcattctttagattggttagggacacaatcaatttgggtacgggcgtggtatgaaataaatgtataaaattacagtaataatactgctccaatttggacatgagcgatttgacgtcatcgttttctacgatcgtacattgaataatggaattgtagtatatagaatgtttatagtggtattcgtagggtgtcaacaacacgttaatgtcggcttcgttgttcacccgcaacttttttttgatgcataccattccttcgtgatgattaacgtaaagtattctgtctgtaatcttcaattcgatgggcgccatgtttcttttcatagtgtacacaatgaacgacgtgtttaattttaaacattttaaatttgtgggtctatcattaaacgcgatcagcaacgagtcgtcttgaacgtcgttgaggtcgtctacgaactcgaccagattgtgttttagcaaatattgaaatttttgcgcaaccatttcaaagttcacgttgggcaaacacgcgttgcggcagaggaaaaactttttgcccgccacggtcatttcgccgtgaaaaaaactgccaataaattttacaaaatcttttttttgcttcaacattttctggcgcatgctgtcgttggtgattcgcgccacttcgttgccgacgcgatattttaacacgggcaacgaaatttcaatattgttattgctgctgttgtcctgttgattgggaaagactttgcgttgcttgctaaaagttttcgatacgcaatatatgagacgcccgttgactatacaatcgacaatctttttcgattctttgttatacaagacgctctgaattttacgacgcttgttcgccaccgtgtacgcgtcgtcgtcggccgtcttgtcgagaactcgttgatagttttgcagaattgtcgaagttaatagcaattctatcaaataggcgtgcttgtatacaattttattggccaaactgtctatagaatagtttatgtcgtgattcataataatttttatgtgttccacgagttgttgtttgtgaagcgtgttgtattcgaagagaaaatcgagcggtttccatttgccgctgttggccagatacgtttccagcacagaatttaaatcttccgtcaccacgtaatcgctagcgtacacgtctcgagcaaacaaaacgtcgttttgtttgtcgtaaactagttggattgcgcgattaatgtgcttttcttgatccacgttgccgtacaaaaacatgcgtttgcaatgtttggcgtataacttgtcgtagaaattgtgcaccaaaacgttgttgttcatcattatgttgggaaaactcaaaaatctgccgtccagcataaaggttccgttaatattgttgtttgcgtcgatatcgtccgtttctctaaattgcttgtctaagcgcgtgccgaatataacgggcacacatttatgcatcacgcaattgagctgttcattaagagcgcaacacaaataagacttgcgttcttgaatagccccaaaaagtatacgttcattgttgttgtttgtagcacaatcaaaagtatattttaatttgtatttattttcaattttatcgtacaactcgttgaaatcttgaactacgtccgtcatcgtaaagcgattattgcacactaattatgtctaaacgtgttcgtgaaatgtcggttgtttcggatgaaacggccaaacgcattcgacaaaacgaacactatcacgccaaaaatgaatcttttttggggttttgcaacttggaagaaattgattattatcaatgtttaaaaatgcaatacgttctggaccaaaattttgacaacgattttattttaaccgtgtacagaatggccaacgtggtgacaaaacaagttagaccgtataacagtatcgacgaaaagcaccattacaacacggtgcgtaacgtgttgattttaataaaaaatgcgcgtttagtgcttagtaatagtgtcaaaaagcaatactatgacgatgtgttaaatttaaaaaaaaatacagacttggaatcgtacgatccattgattacagtctttttacaaattggcgaatctataaatgaagaaatacaaaaactcagaaaagctttggtcaatttttttactaataaacccgacaagtcggatataaacaacccagatgtggtttcgtatcaatttatttttgacagagtacaaaaattgtataaccgagaaattaaacaaaaaactaaaactataattgtaaaacgtcctacaactatgaacagaattcaaatagattggaaaccccattccgaagacgaacaaaaaatgactaaacaagagattgccgaaaacattgtaaagccttgttttgaacaatttggcactatattacacatatacgtatgtcctttaaatcacaaccgaattattgtcgagtatgcaaactcagagtcggtacaaaaagccatgactgtaaacgacgacgacgctcgatttacagttacagagttttccgtggttcagtactacaacgtggccaaaacagaaatggtgaaccagcgaattgacataataagcaagaacattgaggatttaaaaaactctttaaaatcttacacgtaaattaaaatgtcgaacaaaggaaaaaaacaattgtaacaaaaataatttacattaaaatttacaagtttttttctaatgccgtacttttttacaatgtgtctgttgtccgtcgagcattgcaaacatattgtggacgacgcaaaatagcaaacgaaaggcacgtccgcgctctcccacgctattctaaaacgatggatccatattagtttttcattgtcgccaaacgtcgctccgctggcctccttccaataacaaatactcagaaacacaaacatgtacaattgctgtcgcggcgtcaattgtctccgtttttccaagtaatctattatgggaaacaaacacttgtcacagcacaaatactcgttgattgtcacaaccgacaggcacattaggcaaaatgcgtcgcaatttttgtacggacgaaattctatgagaagttcgttgtccatgacgtcttgcgtccattttttcaacaagacacttttatatttgtgatttgtacaactttggtacgtgttagagtgtttttgataagctttgataagtttaaaactattggaataaggccacgtcattatgttctgcaccgtttgtttaaaagacagaaattactatatgttcaaactatttaaagattattggccaacgtgcacaacagaatgccagatatgtcttgagaaaattgacgataacgggggcatagtggcaatgcccgacactggcatgttaaacttggaaaaaatgtttcacgaacaatgcattcagcgttggcgtcgcgaacacactcgagatccttttaatcgtgctataaaatattattttaactttcccccaaaaacgctagaggaatgcaacgcgatgcttcgagaaaccaaagggtttataggcgatcacgaaattgattgcgtttacaagcgcgtttatcaacgcgttacacaagaagacgccctggacattgaactcgattttaggaatttttttaaaatgcaatcatgacgaacgtatggtccgcgacggacgtcaacctcatcaattgtgtactgaaagataatttatttttgataaataataactacattattttaaatgtgttcgaccaagaaaccgatcaagttagacctctgtgcctcggtgaaattaacgcctttcaaaccgatgcggccgcccaagccgatgcaatgctggatacatcctcgacgagcgaattgcaaagtaacgcgtccacgtaacaattattcagatcccgataacgaaaacgacatgttgcacatgaccgtgttaaacagcgtgtttttaaacgagcacgcaaaattgtattatcggcacttgttgcgcaacgatcaagccgaggcgagaaaaacaattctcaacgccgacgacgtgtacgagtgcgtgttaattaaaccaattcgtacggaacattttagaagcgtcgacgaggctggcgaacacaacatgggcgttttaaagatcatcatcgatacggtcatcaagtacattggcaaactggccgacgacgagtacattttgatagcggaccgcatgtatgtcgatttaatttattccgaatttagggccattattttgcctcagagcgcgtacattatcaaaggagattacgcagaaagcgatagtgaaagcgggcaaagtgtcgacgtttgtaatgaactcaaatatccttggaatttaattacggcgaacagttttattgtttctacggacgagtcgcgtcagtcgcaatacatttatcgcacttttcttttgtacaatacagttttgaccgcaattctcaaacaaaacaatccatttaatgtaattgctgaaaatacttccatttcaattatagtcaggaatttgggcaattgtccaaacaacaaagatcgagtaaagtgctgcgatctcaattacggcggcatcccgccgggacatgtcatgtgcccgccgcgtgagattaccaaaaaggtttttcattacgcaaagtgggttagaaaccccaacaagtacaaacgatacagcgaattaattgcgcgccaatcagaagccggcggcgcatctgcgagtttacgcgaaaacgtaaacaaccagctacatgctcgagacgcgtctcaattacatttattggattgggaaaattttatgggtgaattcagcagttattttggtctgcacgcacacaacgtgtagcatctccaatatttaacagctgacctatttgttaaacaagcattcttatttcaataattggagacagttgtatccacaattatgaaaaaagtagcgcttggaaaaattatcgaaaacacaatagaaagcaaatataaaagcaacagtgtgtcgtcgtcatcgtcatcgtcaacgtcaacgggtgccagtgcaaaattgagtttaagtgaatattacaaaacttttgaagcaaataaagtgggccagcacactacgtacgacgtggtcggcaagcgagattacaataaatttgacaaattggtgaaaaaatattgacatgttgcgatcaatcatacgacgtttcaagagtacaaacaatctcagcaaaaagccttccgatcattatgtagtgttatgtccaaagtgttattttgtgacgtcgtccgaagtgagcgtggctgaatacatagaaatgcataaaaattttaacacaaaattcgccgatcggtgccctaacgattttattgtaattaattctaaaagttggaataatcatgaaaattgttctgccctattttaccctgtgtattaataaagtttgttgtttgtatttttatggtttcatttaattgcgctagatatcgggttagatatcgggttaggttcttagaaatggctcagttgagagaacgttagactgaagatattgggtttaaggtccttagaaatagagttgtattttccttaccaaaaagggatttgagctttatataaatacaattttcgctcgacagcggtttatttcactcgaaggtattatctcagacagtcgaacgtgcgcgcaatgaaacttcccgtttacgctaaatatttggagtttgatgatgtagtgttagatttgactagtttaatatttttagagtttgataacgatcaaaatgaagagtatattatttttatgaatgtaaaaagagcgttttacaaaaattttcacattacttgtgatttgtcgcttgaaacgctgaccgtgttggtgtacgaaaaagctcgcctaattgtgaaagaaatgaagtttgagcagccgccaaattttgttgattttatcagtttcaacgcgaccgacaacgacaactctatgataatagacttgtgttccgacgcgcgcataatcgtggccaagaagctgacgcccgacgaaacgtatcatcagcgcgtgtccggatttttggattttcaaaaacgtaactggatacctcggcccccaatcgagtcggacccaaaagtgcgaaacgttttggatcgtgaactagaaataaaactgtacaagtaaaaaaaaaattaatttattaatagttgtaataattatcttcgtcctcatcttcgctggtgtcataatgcggtggtgtgtttgtgtgttgttttaatcgtttacgcggcgtcgacaccactttgccgataggaatttttttggatttcgaattaaacgcccgcttagcgacgactcgccgtttacgactattaaacgtgttgacgcgctcttcgtcttcagtgtcataatccgtgctagtgttttcgttgttaagacgatcgtttgatttagttttcgtagaattgtccgcgttatcgtcgctttcgtcaatgtcgtccctaactatctcgtaggcggctttgcgcggaatccaagaatttttcaatgtatttattttaacgtacttttcttcgagcgcttttctagctttatgcatagcaatgtcttcgtcgccgccgttcattttatgatactttgtaaacgcctcgacaaataactttttggcgcgaggaggcattttttcattgtataacatatcgggaatttgatacattgtaattagaattaagcaatttcgtcttcggtttctgtatctgtagtggaatcctctgtattagtagtagtagtgtcgctattgttggcgtcaggccttggctgccatttacagtctatcaatatgtattttttcctaacagcacaacatgctagcttggtagctatatgtgtcgacttatatttttgtaaactacgatcgtagaatttttcaaatatcctcttaccgttatagggaaggttttgataatatttaggtaacatatcaataaaagacaatataataaaaactttgtgtgtgtgtgtgttttatttatcacataaaatggacgtctggcaaaaatcacaaccaatattagtgtttttttcttacattacgagattcaacttgatactaaaattaattatcacttaaattaaattaaattttgaagcatttttttgctatcgttttcaaactcaaaattatcaacgctatcgctatgaaaagcgtaatatttgttggctttgagatattcaatattttgctcatttttaacaataaacacgcgacttttttcgtcgcgtctcaccataacaccgtttttacaaatggaaatgtatttgtaaaacggcaacagagcgtcacgagtttttttaagtaacagcttttgctccgctgtggcggccacaaatatttttacgggcccgtcgtaattaatgtttaaattaaaatttttaagtcgacgctcgcgcgacatggtttgccattctttagcgcgcgtcgcgtcacacaacttggccacaatgtggtttttgtcaaacgaagattctatgacgtgtttaaagtttaggttgagtaaaatgcaaatcttttttaaataatagtttctaatttttttattattcagcctgttgtcgtgaataccgtatatctcaacgctgtctgtgagattgtcgcattctagcctttttagtttttcgctcatcgacttgatattgtccgacacgttttcgtcgatttgcgttttgatcaaagacttgagcagagacacgttaatcaactgttcaaattgatccatattaattatatcaacccgatgcgtatatggtgcgtaaaatatattttttaaccctcttatactttgcactttgcgttaatacgtgttcgtgtacagacgtaatatgttttcttttttggataaaactcctactgagtttgacctcatattagaccttcacaagttgcaaaacgtggcattttttaccaatgaagaatttaaagtgattttaaaaaattttatcacagatttaaaaaagaaccaaaaattaaattatttcaacagtttaatcgaccagttaatcaacgtgtacacagacacgtcagcaaaaaacacgcagcccgacgtgttggctaaaattattaaatcaacttgtgttatagtcacggatttgccgtccaacgtgttcctcaaaaaattgaagacaaacaagtttacggacaccatcaattatttgattttgccccactttattttgtgggatcacaattttgttatatttttaaacaaagctttcaattctaaacatgaaaacaatctggttgacatctcgggcgctctgcagaaaatcaaacttacacacggcgtcatcaaagatcagctgcagagaaaaaacgggtacgcggtccaatacttgtactcgacgtttctcaacacggcctcgttctacgccaacgtgcaatgtttaaatggtgtcaacgaaattatgccgccgcggagcagcgtgaagcgctattacggacgtgatgtggacaacgtgcgtgcatggaccacgcgtcatcccaacattagccagctgagcacgcaagtttcggacgtgcacattaacgagtcatcaaccgactggaatgtaaaagtgggtctgggaatattccccggcgctaacacagactgcgacggtgacaagaaaattattacatttttgcctaaacctaattccctaatcgactcggaatgtcttttgtacggcgaccctcggttcaatttcatttgctttgacaaaaaccgtttgtcgtttgtgtcgcaacaaatttattatttgtacaaaaatattgacgcaatggaggcgttgtttaaatctacaccgttggtttacgcgctctggcaaaagcataaacatgagcaatttgcacaaaggctggagatgttgttgcgtgatttttgcctaatcgccagttcaaacgctagttatttactttttaaacagctcacacagcttatagccaacgaagaaatggtgtgcggagatgaagaaatattcaatttaggcggccaatttgtagacatgattgaaagcggtgccaaaggcagtcaaaatttgattaaaagcacgcaacaataccgacagactttaaatacagatattgaaactgtatctttgcgagccaccaccagtttaaatagttacatatcgtctcacaacaaagtaaaagtgtgtggcgccgacatatatcataacacggttgtgttacaaagcgtatttattaaaaataactatgtttgttacaaaaacgacgaacgtacaatcatgaatatttgcgctttgccctctgagtttctgtttccagagcatttgctcgacatgtttattgaatgataatataaataaagcgtatttaattagatgcaatcagtgttttattaattttaaagcaacatgtacaataaatttctgatttatcttcacttaaacgggctgcacggagaggcaaaatactataaatatttaatgtctcaaatggactttgaaaatcaagtagccgatgaaattaggcggttttgtgaaacgcgtttgaaaccggcaatcagttgcaacactttaactgcggaaaatctcaatacgctcgtagacagcgtagtttgcaaaaatggactgttaaatccttacgccaaagaagtgcagtttgctttgcaatatttttttgacgacgacgaaatatccaaacaagatcaagatgactttaaactatttttattacataattatgacaattgtgaaaatatagaagaatattttttaattaacaattttagcatagcagattacgaatttgaagacatgtttgaaattgttcgtattgattgtaaagatttgttattacttcttgctaaatataatatgtaattaaaattttgtttttattttattaaaatcctggattaaaaaaaatgccccaatcccaagtttttgacacctatgactagcaatttgatttgtgtgcacgccaacaagatttttcgtcattatgatcaatgcgtgcatcaagtttatgtttttgtaattggcttctgaccactttagccatttgagcgtatctgcattcgtcgtctaaagtttcaaacaccagatcggcgcaattataaaatccttcacccacgggatctatgcgctgccaacgcacatacattacaaattgatttgacctgtacggtattactacgggtatagaatagactagactgttgtcacacaatgaatcgcccggatttggaattaaatttgaatcgttaccacctatgtattctaattcgttccaagttattggattgcgacgatcccagtttgatttagtaataaacacttcaaaatagctgggctcgtgtatggccgttggacaaaaatgaacattcatccgataaaccggttgatagagatttaaatatagcgtatctggcttccagttgttcaaaggttcgtccattccgcttttatcaccaaacacagaattgcgatcgtttgaaccggcaccgcaaagtgtgtgcggcacaaccctttgtttgattaggtcaaaatcgtcataattaggaccggccacagacgcgtattccatatactgttgaaacatgtattgcgctgtggcagcggccgccccggattctaaatcgagagctcgatatttataatagactgatttgtaagcattgcggcacgcggcgtcgggaatgttatcgccattgtggggccaataaaaatttccatctttaaaacatttatattgacgggccgtcggcagggacagatagccgtgagagcgcactgccggcgcgtgaatcacagcaaacaatgcaattaataatgcaatcattatgattatacttatagaacactaatcggaataataaccgctgtcgtaaccttggtcaaaaacgttatgttgaaacataataacaccttacagtaacatacaataaaacaacatagtatcgtatataatttatttttttattttatacaaacaaaatttatacgtattgttagcacattgagtgtcattttcgctgtctgaactatcacaaccatcgtcatcatcatcatcattattgtcgtcgtcgtcgtcacgtttgcgtttgacactgcattttttttggttaatttttactaacactggttcttttcgatcgtacaattgattctgcatgtacttttgcataattgcggtaaaacactttgcaagattatccttttgttcgtcgccaaatatttccagcaactcgttcataaatgtgcacaaaatgcccatgtgttttatccagctgattcgcatttttactggatcgaacaaacgcaacgggtacgctttttctgttaccttgccctcgatgtctatcaaaaggtacgggatacgatctccgttgccgggcacaaaatccgtgcctttgttaaccaaaatttctctacaatgccgagccaccgtaatcacacgtcttttgggcgacggaccttcattattatcgtcagccgatttgcgttttttgcccgggttatcgttataggtcatactaaagctgtaatcggtcatcggttttgatttggcaaactcatcatagtattcataaaaactagcctgtaaactttgcaaacatttgtttatgtccaaatgacgcaatatttgttccactgccgtcctaaacgcaattctcataaaaacgggcatatcttttttaactaaccaacccttgtatacgatcttattctcgctgttaagatagcaatattttttcttttttaatattattaaaactttcattaaattttcaaatgccattttgtaaccgtccgtaaatgagctattaacgcgcgtctcaacatgtgtgcatatttgttttaatgtgtcggtttcgtcaaatatttcgttatagttaaatgtgggcaaaacaaatgtagaatctgtgtcgccgtacacaactttaaaaccgatgctgttcagattgaatttttttaaaatctcaggatcgttgcttaaaccttcaatcagagaaatggcccgccgcaactgattgcgaccaactctagtgatgtagtttgcaagcactttgtaaaaaatgccataataaccgtatatgctattggcggtgcgcttcacggaattttgtttttgatcgtacagatcgtacaagaatgccgattcgctttgattgtcgcgattctttttaaatttgcatctttcgctcaacaattttaatagcaatttaacaactattgcacgcgaattgtggttcaaatacacgttgccgtcttcgcataaaactaaattggacaaacaagcacaaatggctatcattatagtcaagtacaaagaattaaaatcgagagaaaacgcgttcttgtaaatgcttgcacgaggttgtaacactttgccacctttgtacttgaccgtttgattggcgggtcccaaattaatggcatctttaggtatgttttttagaggtgtcaattttcttttgagattagaaatacccgctgtggctttgtcggcgttgaattgacccgatattattgacaaatcgtttttgttaaaaaaatacgggtccggctcctctttgccggtgctctcgttaatgcgcgtgtttgtaatggctgcgtaaaagcacgccacgctaatcaaatgcgaaatattacatatcacgtcgtctgtacataaacgatgcaatatacattgagaatatacagaatcggccattttcagtttgacaaacaattttatcggcaacatgcaatcctgcacgttatacttggcaattacgtccagccgtcgagtgttgtacatcttgaccatttcggtccaaggcaaatcgattttgttttcgcccaaataataactactgattgtgttcaattgaaagttttcaactttatgctgattagaatcgctgctgaaaaatttatacaaatcaatgtgaatgtaatagttaaaataatacgtgtccactttgttgcccaacttgtttataaacagctttgttgtcggcgccgcagccggcaaatcgtaacgctttaataacattttggttttattcagtcgtccaagtatatagggcagatcgaatacgtctccgttaaaatccaaaatcacatcgggatttgtaatttttatcatgtcaaaaaacgctgtaatcatgtcgacttcattttgaaacatgaccacatgcgtgtcatcgtcatgggtctctggaatctcggtcggcagcttgtgatacataaaacaaaatcttgcatactcgtcgtttttgtacaccacaaatcctatagacattatgcaatcgaccgatgctttcgacatgttgtggccgtccgaatgcgtctcaatgtcataacacgacaaaacgggcatgatgccgctggttaaagtcatttcatcgaccaactcaaagtcttcatagaaatgttgcaaattaaacatgcgcgttgtcgatccaccgacataattattttggcagcgttgtgttttcttaaatcgcatataagcaccttccacaaacggcgtttgcatgtgtacgcgattaacgttgtgaagaaacttgtccaaacaggccgcgttgtccgatggcgctgctttgtttctttcgtatttaatcacgtttatcttgtttaaacaatttccttccacgcccggcgccacaaacgtggtgtaactgatgcacttgttgcggcaagacggaaatatgtgcttgtcgtagcattgtttgtaagaatacaaatttagttttactttaaagtaaaactgcaggactcgtttttcgatatttgtattacaaaatgcaaacaagcagccttgtttttcatcgtaatgcaaacgaatgatacgaaacgtatcggctgaagtaatactgaattctcctggttttgcatattctgcaaagcgcgttttgagttcattgtaagaatatattttcatttttaaatatgcagcgatggcccaaatatggaggcacagatgtcaacacgcgaactgtacacgatttgttaaacaccataaataccatgagtgctcgaatcaaaactctggagcggtatgagcacgctttgcgagagattcacaaagtcgttgtaattttgaaaccgtccgcgaacacacatggctttgagcccgacgctctgccggcgttgattatgcaatttttatcggattttgccggccgagatatcaacacgctgacgcataacatcaactacaagtacgattacaattatccacagccgccggcgcctgtgcccgcgatgcaaccaccgccgccaccgccttttcatcaacctcccgcgccacctcaaccaccgtattacaacaattatccgtattatccgccgtatccgttttcgacacagccgccagaatcaaatgtcgcgggcgtcggtggctcgcaaagtttgaatcaaatcacgttgactaacgaggaggagtctgaactgacggctttattaaaaaacatgcaaacgaacatgacttgggaacttgttcaaaattttgttgaagtgttaatcaggatcgtacgcgtgcacgtagtaaacaacgtgaccatgattaacgttatatcgtctataacttccgttcgaacattaattgattacaattttacagaatttattagatgcgtataccaaaaaacaaacatacgttttgcaatagatcagtatctgtgcactaacatagttacgtttatagatttttttactagagttttttatttggtgacgcgaacaaattttcacttcaccacttttgaccaattgacccaatactctgacgaactttacacaaaaattcaaacgagcatacttaatagcgcggctcctctttctcctccgaccgtggaaactgtcaacagcgatgtcgtcatttcaaatttgcaagaacaattaaaaagagaacgcgctttgatgcaacaaatcgttgagcaacatagaattgcaaacgaaagagtagaaactatgcaatcgcaatacgacgagttggatttaaagtataaagaggtgttcgaagacaaaagtgaattcgcacaacaaaaaagtgaaaacgtgcaaaaaattaaacaattagagagatccaacagagaacttaacggcaccgtacaaaaattgagagatgaaaatgccgaaatattgtctgaaatacaattgcaaaaaggcgatttggacgaatataaaaacacgaatcgccagttaaacgaggacattcatagactcaaaaaaagaatggaatcgacatttgataaaaattacgtcaaaactttgaacgataaaattgaatcgttggaaaagcaattggatgatacacaaaatttaaaccgggaactagaaagcagtattaacgaaactgcacagacgtacaaatttgacgccaaagatgttatggaactcaaacagtcggtatcgattaaagatcaagaaattgccatgaaaaacgctcaatatttagaattgagtgctacatatcaacaaactgtaaatgaattagctgcaactaaaaatgaattgtctcaaatcgcaacaaccaatcaaagtttatttgcagaaaatgaagaatctaaagtgcttttagaaggcgcgttggcgtttatagatagcttttatcaaataattatgcagattgaaaaacctgattacgtgccgatttctaaaccacaacttacagcacaagaaagtatatatcaaacggattatatcaaagattggttgcaaaaattaagatccaaactgtcaaacgccgacgttgccaatttgcaatcagtttccgaagtaaatgatttaaaaactcaaataatttctattgtaccacgaaatattgtaaatcgaattttaaaagaaaattataaagtaaaagtagaaaatgtcaatgcagaattaatggaaaatgttgctgtcataagtgctgtaagcgctttagtacagcaatatgaacaatcagaaaagcaaaacattagacttagaaaagacttcgaaataaaattaaacgagttacaaagattattggatcaaaatcagactgattttgagtcaatatcagagtttatttcacgagatccggctttcaacagaaatttaaatgacgagcgattccaaaacttgaagcaacaatgcgacgaaatgtctagtaaatattcagccttaaaaacgactaaaattaaagaaatggaatctattgcagatcaggctgtcaaatctgaaatgagtaaattaaacacacaactagacgaattaaactctttatttgttaaatacaatcgtaaagctcaagacatatttgaatggaaaactagcatgcttaaaaggtacgaaacgttggcgcgaacaacagcggccagcgttcaaccaaacgtcgaatagaattacaaaaatgtataatcattttcatcttcgtcatacttcaacaatcccaacacgttcatgttgccattttcgccgttttcgacagttacgtaaatagttactttgattaaattatcttccagcagcattgagatttgattaaaatctgcacataatttttgtagcgaatccgcttcggtttttttatttgtgttgacgtagaaaacggacttgttccatttgctcgagtcggaagaggtagaacggtcatccgaatcggccacgttcaaatcgtcgctcttaaactgcacaataaacttgttatcgctcatgtcattttcttccaattcgctttttaacatatttacattgtacgaagcaacgcgtttgttcgatcgactaatgttgattcttgcgtttgtgcaattttgcaaatttgaataggcttcgttttctttagcctcgcacaattcgatgcgcgtagagttgaccacgttccaattcatgtacacgtttgctccattgaaaatttgttgacattttatattgtaaatggtaaagatttggttttcattgtcttttaaatatttaaacacctcattgatgtcgtcagacccctttatattgtttttgaatagattcatcagtgttttcgcattgacaaaacattccacttgaaccacgtcggaatcgtcgttaaaatttttgtacgcgacttcaaaaacaattttgtacaaattgctgttgattttcttgtaaataaatttgtactttacaataatattgacgctatcttcgttttcaaaatgtttgttagtcaaataggcgctcagggggattgcagtttcaatttccatttcacattctttgtattcgttgatctgaatcatttgactaaactttgttttcacataatttaaactaatgtcatagcacttgccttcctccatgtctttgaaagattgcgaatcgccgtagtattcctgaatcttgttgtcggacattattctaaaagtgtaatagtattcattatcgatactcagcgtcattttgcccattaatttaccattaattcttttgtaattttctctaatcttcttggggctattagccatagccatgcgttttataagcggctcaccgctactttctccagaaaaaaatcttttggtcgccatattgctgttgttgtcaatatgtgggaatctatacgatggcaaatactgaatggcgacgaaatcgaagtgtctccagagcaccgttcgttagcgtggagggaattgattataaatgtggccaacaacacaccgcttgacaacacgtttagaacaatgtttcaaaaagccgattttgaaaatttcgactacaatacaccgattgtgtacaatttaaaaacaaaaactttaacaatgtacaacgagagaataagagctgctctcaacagacccgctcgatttaacgatcaaacgaccaatgttaatattgcctatgtatttttgttctttatttgtattgttttgctgaacgtgttggtcgtcttttccgacacaaaccgtacgaccgacacgaagcgtaaaaatgttgcaacaaaaattaaataaactcaaagataatttaaacacgttcagcagcaagtcggtggtttgcgctcgctcaaaattatttgacaaacgcccaacgcgcagacctagatgttggcgaaaactattagaaatcgacaaaaagtttcatgtttgccgacacgttgacacgtttttggatctgtgcggcggaccgggcgagtttgccaactataccatgtcattgaacccgctttgcaaagcgtacggcgtcacgttgacaaacaactcggtgtgcgtgtacaaaccgacagtgtgcaaacgcaaaaatttcacaaccattacggggcccgacaaatcgggtgacgtgtttgataaaaatgttgtattcgagattagcatcaagtgtggcaacgcgtgcgatttggtgttggccgatggctcggtcgacgttaatggacgcgaaaacgaacaagaacgtctcaactttgatttgatcatgtgcgagacgcagctaattttaatttgcttgcgtcccggcggcaattgcgttttaaaagtttttgacgcgttcgaacacaaaacgattcaaatgttaaacaagtttgttaaccattttgaaaaatgggttttatacaaaccgccttcttctcggcctgccaattccgaacgctatttaatttgttttaataaattagttaggccgtattgcaatgattatgtcaatgaattggaaaaacagtttaaaaaatattatcgcatacaattaaaaaacttaaacaagttgataaatttgttaaaaatataacgtgtgtatataaaaagccagcggcttcaaatcaggcatcattcaacatggatctgctcatttacgatgtcgacaattattctttcaaaaatgatagtgtgcaataaatgtttaattttaaggatattgttatggaataaactataaaatgaatttgaggcaatttaattttttgatactttccacagacggtcgattcagaacaatggcaaacatgtcgctagacaatgagtacaaatttgaattggccaaaacggggctgttttctcacaataacctgattaaatgtataggctgtcgcacgattttggacaagattaacgccaagcaaattaaacgacacacatattcggattattgcatatcatcaaccaacgcgttaatgttcaatgaaccgatgagaaaaaaatcatttacgagttttaaaaaatctcggcgtcagtttgcatcacaatccgtggtcgttgacatgttggctcgtcgcggtttctattattttggcaaagccggccatttacgttgttccggatgccatatagtttttaaatataaaagcgtagacgacgcccaacgccggcacaaacaaaattgcaaatttgtcaacgcaatagaagactattccgttaatgaacactttagcaaacttgatgttgcggaaaaagaaatactggctgccgatttgagccctccgcaattaagcgttaaaccttcggcgccgcccgccgaaccgctaactcaacacgtttccgaatgcaaagtttgttttgatagagaaaaatcggtgtgtttcatgccttgccgtcacctggctgtgtgcacggaatgttcgcgtcggtgcaagcgctgttgtgtgtgcaacgcaaaaattatgcagcgcatcgaaacattacctcagtaaacattgcaaatgactacgacattctttaaaaataagctattaataattattgcattgtatgacaaaaaaattattaacctgctgcaaagtaaaacttgtaaaaggctttttgaaaaaatttgctaatttattttgtttctgcgtcgtgtcgcatctaagcgacaaagacgacagcgacggtaatcgctattatcagtataataacaattgtaatttcatatacataaatgttgtaaaataaaaacccatattattgtacataatgttttattgtaattaaatttatacagcgatttaaacatatgctgatgctgttgtgaataaattttaaatttttatttgtttcgtcaaacaccatggcgttgctttcaattagtttttttgttagcatttcatctaaaaaatcaaactgtttgcccggcgcgtttaaggattctatggtgtaatcgggcgtgtcgctgtttagatattggtccacttcgcgcatcatgtccaacacgtcgttctgcaaacgaatgagctttgtcaccgcgtccacggacgtgttcatgtttcttttttgaaaactaaattgcaacaattgtacgtgtccactatacaattcggcttaatatactcgtcggcgcaatcgtatctgcaatccaatttcgtgttcaagaaattggtgatgatatctttgaacgtgcacgttttcaatttgtctttatcggccagcgcaagtttcaattcgctctgtaaagtttctaaaattttgtctgtattgttgtcaaattcgtgcgtgttgcgttccagccacagtttgaacggctcgtcgacaaaaatgctgcgcaaaacctcgtacaactgtctgcctaacgtgtacacttgctcgtattctttcatgttggtctctttgctaacgtacattactaaaaaatctacaagtattttcaaacatttgtaatacgcgacgtattttgatttgagttttaagccgtccaccgtgtactcgtcctcgttcgcatcgaccacttttcgattattattatcatcgccgcttgttgccggcgcgtcggtttgttcggttttaattatatccgattcaatatttaaagtttcaaaaggtttaatggcattcataaaatcatctttttgctctggcgtggttaatggtaaatctatcgagaagttgtcgtcgtccgtgcactcttcgggcacgctgttcagacgtaacgtaacgtttttaggatcgttttcatcgggtattaaatcggctttaattttattagaattaagcgacattatggtggtcgcttgtaaatttaataaattaattaaagactgaaattgtatattgcacaaatttattttcatttttatttatcttactattaatacgccggcaattggtatgcttcgtccagttttgtgactagaaaatttgctaaaaaactgagctcgtcttgtgttaaaacgttgtcgtccacgaatctatgcaatgtaaatgttacactgacattgtttaacaatgcatgtattaaaaaatcaacctgtcgcctactgagtttattagaagagtcgaccgtttctactagtttgtagattttgtcattttcaatttcatcgtttaaaaacatgttaattactcgtttaagtttaagcgaaaaatccttgtccggatagacttgttcgcacagccaatcgctaagagtggttttgaccacggacaccttagtggtgaacgttgtcgatttgaccagttcggtgaaaaagtttttcattaaattggacattttaacgagcacttattatcaatctattgagctggtatttttgtttaaaatcgcatcaagcgcttgctcgatttccaatttttttcggacgctcttagctttatgactcggtatgtcttctacgttagactcggtgtttttacttataatggccgggctgacgacgataatgaacacgagaaacaatatgagcagatacaaaaagatgctgttttcctttttgtcatacactaaactaaatatggtcagtgcgcccaacaacaaatataaattcatttttattcccttactctattcgttgcgatagtacaacaacgattctcccgacgaaccggacgaattgcgattatgttgcgcgtcgtcgtcgttgttgttgttttcctcttcgctgctcgtttcgtctaaacctatattgtatttgttcaagtaatgtttggtgcttgcggaagattcgtgattcattaatttggccactttttgtaaaggcacgccgctattgtataagttgctgctcaaataatgtcttatcatgttgctgcgcggccgttccatctcgacgcccgactcttcgaggagccgcctgaaatctttaaagggcgtcgaggtgtttttagatatttgcaaaatggtcgggtttcgtgaataaatttcgcgtgccaattccaacggtttcattttgatgttgttgagcgtgttattacgactgcgttttcgctttaaattaatcgtgtcgctgtgcagttttccttttttgattagcacgttgagatcgttcacgctgagttggcgcgcttcgttaattcgcatacccgtccctaacatgatgcaaaacactatcgcgcccctaattagaccgcggtcgtgaacataatcgccgttgagcattttaattttatcattaataaaatttaatatggtatctattacgtttttaagcattaaatttttttcctttttcctgatatttttgagctccttgtcgcgcggcagcataaccatgcggggaattttgtattcgggcaaattcatcatgttggtgtaaaagtttatagtcaactgtagcgtttctttggtgaccgatcgaagttcgagcatgcgcctgcacagttcttggggatcgatgagaagtgtttggttttctatcgagtcaaactccatgtccaacgagtacgacatgtcttccaggtgaacatcgtctaccgagcagtacacaattttaataaatcgagacttgtaactttttaaagtggtaggcgcaaacggtttgggaaacatgtacttgctccacagactgttgttctttacctcgtcgggcgtgcatcgctgccgatcggtggccaaatcgaacacggactcgaaccggggagtggattgaatttttattttccaagaattaaaattgttttcgttgcgaacattaaaaccgttcattgtggttaatcgagtttattaaaaacaaaaggagaatcagtgtcaatactatccgaatattgttgttgttctcttaatattacgaaataatatattacatacaatagtaaaaataaagctataaaagcgactacactaattaaaattataattcccgccgacacgttgctcgtcgtgttgttatagcccaccatcatgtcgtctattggcattttgtaaacgggctcgctaaattgttgcggttcgctggtgatatcatcgttgagcgccaatttcaacgggatgtattccaccttttcgtggttgcccaaccgatagtatggcacgtccaaattcatgtttacaacttatttgctaacagaaatttatgcaacaaaagtggtttggctttgatgagacgcaatttgaaatacttgctgcatttacgcttaagattgtattccatgcgggcggcggttttgtagtcgtacgcgctcgcgctgtgatacacgagccgtaaattggttgcgttgcgcaaacacttggcgccttgtttgttcgaatgctgttttatgcgtctgttaaggttgctcgtgatgcccgtgtacaattttccattgtcctgccgcagaatgtacacgcaccacaccttgttggtgtacagagtcgtcgccatgattatacagtgcgtcctttcgtgtttggccgagtgacgttaggcgcggccgcggcaataatagcgttggcgtccttgttgtaatttatttgttgaaaaataaaacgtcttagagtttcgttttggaacgccaattcggtcaagctatcctggcaagcgtttttggtcaaatgagcggcgggcgaattgaccgcgttggcggccgacgttaggaaggtagcgttttggaacatgctgggttgcttgccggctcgcgtcgccagctcggccatgtaattgaatatgttggccgacgcagatagcggcgccaaaaacgcaacgttctcttttaaactcatgattcgcgctctgtttttttcgttcaacacgtagtgatagtaatcgccgccgccggcaaacagatcgtcaatcacggcgttgatcaaatcgttgatcatgttgatgtgcggaaagcgacgcgactcgactgcgctctgtatgtttggcggcagagtggcgtgcttgagcaacagagtcatgtaattgttggccagctgctgattgaacggtaacggaatgggaatgttgcacgtcaccgattccgccaccatgtactggacggccaagctgagttgtttggccgcctcggccaaagcgtctttacccaacatatcagcgccaccgttgtaaaatttttgcgcgtacgccggcagcgaatttagcacaaacgatgcctgaaatatattcgaatcgctcggcagggactcggccgcgttgccttgtcccaactctttttgcaaccgaatcaggtggcgtatcatggtctcctccgattcaaaccgctttaccacgtttacgttgatcgggttcgtgtcgatgcacatgtcacgaatagtgtttataaaatgaatcatgagaggactaagttctgacatgtcattgcacctgtaatatctaataattttttgaacaaaatccacacatttgttgtaccaaatagattcgccggcgtcgagcgtcggttctttgctcttgttgtacggtgcgatcgctaccgagtttgtgctgttgctgcggctcgtgtccattttgttgtcgcgcgtcgtaggcggcacgtaccctggcgcgttgttgtaagtttgcgcgttggtgaatatggccgttgccggattagagggatacctcagcggcggcggaggggtgttgtaataaaaattgccacgttcatctgtcatactttttatttgtactcttatgattacaaaactcaatacacggattacttataatatagttgttgtgacaaaaaagcgataataaaattaacaaaattatcaacaagttaatcatggaaaatttttcaacgttgaataacaacaacaaaacggcgcaagtcatcagcaccgtttgaaaactgatgcgccgacacaaaatgctttcgcaatttttaaaggccacattaaacgaattttcacctttgatataatcacgcagttcttttttacaacactcgtcgcacaaaattaacacctttataatgaggccgtcggtgtgtatagtttgaaacgttcgcggttgactgcctggatgaaattcaaacgagtacccattggacacgtgtacttgtgcaaaataatgggctaatatcgaagcgcccgtttttttaacttttacttttgatattttaataacattaatattgttatttgcgtaatcagaatttttattctgctgatcatcgtacaaataatgaagcaacagttcactatcgtatttaattttgttcagcgttgtcaagtttttgtttcttaggcgctgaaacgtctccgtcgtcgatattttcttcgaaatcgattccaacagcgtcggtgttttctttttgctcatcgatagcggaggctgcgtcgtcttcgtcgtcgtcgtcgtcattttcagtttctacggcgcgtttgggcgacgacgtgtttacagcagcgtccgtcttattattatcgggccgataaatttttgtttgaaataacatttggcccttgttcaactttatttcggcgcagttaaacattattgcgttaagatcgtattcgccgttttgcaccaaattgcacaaaatactatagttgccgcacgacactgcagaataggcgtttttgtacaacaatctaagttgctgcgagctagccaccttgataatatgggcgccaacgccccgtttttttaagtaatattcgtcttcaattataaaatctagtacgttttcatcttcactgttgatttgggcgttcacaatgatgtctggcgtaatgttgctcgtgtttgccatttttcttataatagcgtttactttaatttatttggcaatttattttaaatttgacgaaacgacttacaccaagcggctccaagtaatgattgaatatataaagcgcaccaacgcagacgaacccacacccaacgtaataggctacgtgtcggatattacgcaaaacacttatactgtaacgtggttcaacaccgtcgacctttccacctatcaagaaagcgtgcacgatgaccggaatgaaatttttgatttcttaaatcaaaaactccaacctgttgatcgaatcgtacacgatcgcgttagagcaaatgatgaaaatcccaacgagtttattttgagcggcgacaaggacgacgtgaccatgaaatgccccgcatattttaactttgattacgcacaattaaaatgtgttcccgtgccgccgtgcgacaacaagcccgccggtcgttatcccatggacgagcgtttgctggacacgttggtgttgaaccaacacttggacaaagattattctagcaacgaacacttgtatcatcccacgttctatcttaggtgttttgcaaacggagcgcacgcagtcgaagaatgtccagacaattacacgtttgacgcaaaaacccgccagtgtaaagttaacgaattgtgtgaaaacaggccagacggctatatactatcatactttccctctaatttgctcgtcaaccaatttatgcagtgtgtaagcgggcgccacgtggtgcgtgaatgccccgcgaataaaatattcgatcgcaacttaatgtcgtgcgtagaagcgcatccgtgcacgtttaacggcgccggacacacgtacataacggccgatatcagcgacgcgcaatatttcaaatgtttaaataataacgagtcacaactgatgacgtgcataaaccggatcagaaactctgacaaccagtacgagtgttccggtgactctagatgcatagatttacccaacggtacgggccaacaggtattcaaacacgctgacgacgatatttcgtacaacagtggccaattggtgtgcgataattttgaaattatttccaacatcgaatgcgatcaatcaaacgtgtttgaaaacaagttgtttatggacaaatttagattaaacatgcaatttccaactgaggtgtttgacggcaccgcgtgcgtgccagccaccgcggacaatgttaactttttacgttccacgtttgccattgaaaatattccaaaccattatgacatcgacatgcaaacctccatgttgggcaaaatcgaaatgattaaacagttggtttccaaagatttgtcgttgaacaacgacgccatctttgctcaatggcttttgtatgcgagagacaaaaacgccatcgggctcaacccgttaaccggcgagcccattgactgttttggaaacaatttgtacgacgtgttcgacgctagacgcgcaaacgtttgtaaagatttgggaaagagcgttttaaaaacgctcaattttggcgatggcgagtttttaaacgtattgagcgacacgctgaccggaaaagatgaagattatcgccaattttgtgctatatcctacgaaaacggccaaaaaatcgtagaaaacgaacattttcagcgacgtatattgacaaatatactacagtcggacgtttgtgccaacatatatactacactttaccaaaaatatactacattaaaccctaaatatactacaactccacttcaatataaccgcattctcgtaaagcggcctaaaaatatcgaaatatatggggcaaatacacgtttaaaaaacgctacgattccaaaaaacgctacaactatttcgcccgtgtttaatccctttgaaaaccagccaaataacaggcaaaacgattctatttcacccctgtttaacccttttcaaacgaccgacgccgtatggtacagcgaaccagatggtgacgaggcagtggcgccgccgccaaccgcaccacctccaccgtccgagccagagccagaacccgagccagagttaccgtcaccgctaatattagacaacaaagatttattttattcatgccactactcggttccgtttttcaagctgaccagttgtcatgcggaaaatgacgtcattattaatgctttaaacgagttacgcaacaacgttaaagtggacgctgattgcgaatcggccaaagacctatcgcacgttttaaacgcgtacgcttatgtgggcaatgggatcggttgtagatccgcgtacgacggagatgcgatagtggtaaaaaaagaagccgtgcccagccacgtgtacgccaacctgaacacgcaatccaacgacggcgtcaaatacaatcgttggttgcacgttaaaaacgaccaatacatggcgtgtcctgaagaattgtacgataacgacgaatttaaatgtaacgtagaatcggataaattatattatttggataatttacaagaagattccattgtataaacattttatgtcgaaaacaaatgacatcagcttatgattcatacttaatcgtgcgttacaagtagaattctacttgtaaagcgagtttaatttgaaaaacaaattagtcattattaaacatgttaacaatcgtgtataaaaatgacatcagtttaatgatgacatcatctcttgattatgttttacacgtagaattctactcgtaaagccggttcagttttgaaaaacaaatgacatcatctttcgattgtgttttacacgtagaattctactcgtaaagccagttcagttttgaaaaacaaatgacatcatttttttaaattcagttttgaaaaacaaatgacatcatctcttgatcatgttttacacgtagaattctactcgtaaagcgagttcagttttgaaaaacaaatgacatcattcagttttgaaaaacaaatgacatcatctttcgattgtgttttacacgtagaattctactcgtaaagccagttcagttttgaaaaacaaatgacatcatcttttgattgtgttttacacgtagaattctactcgtaaagccagttcaattttgaaaaacaaatgacatcatcttagaggtagacccgtcgccaagacgggtctgctcatatgtcgttttgtatttgtcattgcctcttttcacgacgctgtctggagcatgggtatatggcgtagacccttttcatacgtcgttttgtatttgtcattgacgtgatcgttaattgcttttttggtatattggaaattgtgttaaataaaatgactatattttttattgaaaattattttatttaaaattttaaataattcctacaaacattgaaaacactgtaggtatcttggcacatgcaaacaacgcacggcctatcgtcgaacaccgccattacattatattagcctctcatacaatcgttgaacaattttaataaataatctttacaagtatcgtttgaaggcctcataaacaatttatatgatttaatatcaatatactttttcaatctagcctcgaatgggctgttcacaaattacgcttcttccacaataattgcgtcgtagcaaattgccaaatacttgacgcaactaataacgtctgaatgggtttcatcttgagcacacctccatcatcaaaatcataaaacgatctatttgtggggcaaagctgctgtaccgtataaatcgtataatacgacgcggagaaattaatttctggcagggacgtaatatttgaaatcgtttacgctcaagaacttttagattgcttgagtttctggctttaatatgaaattcatcgaagcgttcaagggccgtttccaaggaaacgacgtcaaacccactacatttcacgatcaaaggataatttgatcgcgttcaaacaatttgtaattgttgaaaacataattactgtttaataatgcatacaaatattaaacggtttattatataaagtgcagtgataactttgttatcaacgcgtttaatgccaacatatataaacgctatataacagtttttgctagtgttattttatacaacattatgaatacaagaggctgtgttaataataataaaatgatatttatgaatgctttgggcttgcagcctcaaagcaaagtgaaaattattgcacataaaacactagaaaaatttaaacgcgacgcatacacgcgtttcaagggcgtaaaggcgatcaagaatgaactaaaaacatacaatcttacgttgcaacaatacaacgaagcgctcaatcagtgcgctttaaacgatagccgatggcgcgacacaaataattggcatcacgatattaaagagggtgtgaaaataaacaagaggcatatatatagagttaattttaattctaaaaccaaagaaattaaagaatattattacattaaagtggaatgttatgtaaacaattaattaattaatctacatttattgtaacatttgtggtgatagtagtagcgtttgtgatacatttatatgattgtaatgttgtgtactcgttttgtaataaatttttgtgtttaatcaattcaatatttttatttgataaaaccttattttcgttactcaatctggcgtttttagccgcaagttttgcgtaatcatcattgagcgattttagtgccttttcagttgaaattcgttttagttgcaattctttaaaggatttgtgcatgttgttgtagtcgtttttaattctgtccaacttttcttgcataaaaacgctagtttgttgtaatttgtttaaatctaattgtcgtttaatgttgagctgcgtttgttcggcaatgtctatctgcagcttttttagtatcgcttgtgattcagacagcatggtgtcgtcagagtttgcggcgttgttgctgtcttccgcgtcgtctaacagacttttttcaaacaacacgctggccaaagaggcggcatcaaaattatcgtttattttattccattgtgcgacactcgtcacgctgcatttaatcacgtccacaacgtttcggtttatgctgtaaacgttgaaatgcaaactttcaaccctgcacaggggacatggtattttttttcgtttcctaatcttgcgtatgcacattgagcataattgatgtttgcacgtgtctagttctaatactggtattatagtcaatctgtctattggttgcataaaataatttttaatttctgcaaccgaaaaacaaatgttgcattgcaatttgacaaactccatttttaggcggctacacctccgcctgcttcgccgagaacaacaccaggcgcaggacctgccagtgcgccgacgccgccgcccaaagtagcgttcggatttgctcttgatataaagtcgtttcgcaaaaagttgttttctgaattaattatttggtatcccaaaaacagcggaacgtacgtcgggtattcttcgtatccgctaagcgttctgtccagctcacgtgtgtcgccttcaaatttcaaaacgtttctaatttgcaaacgattgggttgacttttcatgatgtcactgcttcttatcgggttgtacaactcggggccgtcgggcacagacgccaccagacccgtttcgtcaattatacacgtggcgctatttctaaatctcaattcctccgtgtcgatttgcaagtactcgggcgctactgcgcgtcgaatcaaattttgcaaaaatccactgtaattgttaaataattgatcgccaacaccacctcgatgcgttcgggcgttggtcacgtcgaaaaaacgcaattcgtcgcgcgacacacgcgaacaaaacgtgttcgggtttgtggtgtctagaatgcttcttgtagttgcgtaaacgctgtgtataacgcgttgcgtgccgcttgtgaaaccttcggtatattttagattgtcgcatataacgttaaccgcctcttcgttgttatatatcaaatgaaagattagttgttcggcttgcatcatactgtttagattaaacacctcttggtaattggttgcgcttggaattaaaattcgcttgatacctctttctttatttccaactaaatgcctagcgatcgtcattttgaattgattgtcgtcttcgtcgaaaatgggcaaaaccatttttgacattttaaaacgtttgatgaggtggctgttgcagataaaccatccgtcgtcatgatacgcgtcgggcgaacacggtgacttgtatgttatgcacgcgtcgaacgacacgatggacgcgaaaatgcagcggttaactctcatttgtcgcggcgccatacccacgggcattagcgccatattgttgccgttataaatatggaccacggcaattttatgattgagaaagaaatctcttattcaataaattttagccaagatttgttgtataaaattttaaattcttatattgttcctaattattcgctggcacaacaatatttcgatttgtacgacgaaaacggctttcgcactcgtatacctattcagagcgcttgcaataacataatatcaagcgtgaaaaagactaattccaaacacaaaaaatttgtttattggcctaaagataccaacgcgttggtgccgttggtgtggagagagagcaaagaaatcaaactgccttacaagactctttcgcacaacttgagtaaaataattaaagtgtacgtttaccaacacgataaaattgaaatcaaatttgaacatgtatatttttcgaaaagtgacattgatttatttgattccacgatggcgaacaagatatccaaactgctgactttgttggaaaatggaaacgcttcatcggagacgctgcaaaactcgcaagtgggcagcgatgaaattttggcccgcatacgtctcgaatatgaatttgacgacgacgcgcccgacgacgcgcagctaaacgtgatgtgcaacataattgcagacatggaagcgttgaccgacgcgcaaaacatatcaccattcgtgccgctgaccacgttgattgacaagatggcccctcgaaaatttgaacatgaacaaaaaatagtgtacggagacgacgcgttcgacaacgcgtccgtaaaaaaatgggcgctcaaattggacggtatgcggggcagaggtctgtttatgcgcaatttttgcattattcaaaccgacgatatgcaattctacaaaaccaaaatggccaatctgttttcgctaaacaacattgtggcctttcagtgtgaggttatggacaaacaaaagatttacattacagatttgttgcaagtgtttaaatacaaatacaacaatcgaacacagtacgagtgcggcgtgaacgcgtcatacgctatagatccggtgacggccatcgaatgtataaactacatgaacagcaacgtgcaaagcgtcacgttgaccgacacttgccccgaaattgaattgaggtttcagcaattttttgatccgccgctacagcagagcgattacatgaccgtgtccgtggacgggtatgtcgtgctcgacaccgagttgagatacgtcaaatataaatggatgccgacaaccgagttggagtatgacgccgtgaataattcgtttaacacactcaatgggccattgaacggtctcgtgattttaaccaacttgccggagttgctgcacgaaaacatttacgaatgtgtgatcgcggacacgacaataaacgtgttgaaacatcgtcgcgaccgaatcgtgccaaattaaagcacgttaagcggatagaacgggcagtctgagctgttaaagtcaatacaaccatcgctaacatacgaatacgccgtgttttcgggacagttgacgacaaacaaaggaacattgtaataattgcaatgaaatatattgttacaattccacggcacagcgtatgtttttcgagtttgatcagtttcacacaacggcctaagaaaatctgtcaatgctttgtttgtatttatattagaaggaaaatacataggtttgcccaaaggctttggtgaaggcggcggcgatggtggaggtgtaggtgttggtggaggtggtggtggaggtgtaggtgttggtgttggcggtgtaggcggtgtaggcgatggtggatttggacgcagagtgtcgttaaataattttataaataaataaattattattaataaatttaatattattaatattataacaatgtaccacatgttgcttaataaaaagaatcaaacaaaaacttgtattattgcaaatttaacaattttttatattctccccatgtcatgcgttcgtaatgagcgggcggcttttgatttctttgtatccacttgtaatcgttaacgtggttgtgaaaagtcatgataacgtaggccattaaatttttcatgagcatattgttcgacacagccgcagcgtccgcaccggcggtttcctgttggtacgaatcgacaaacgtaatgtctgtcccgtatttttccttgtcgagtgcaatttctattagctcaatgtggtaaatgaggaaacctttgacgttcatataatgatcgcggcacatggcgcactgtagtatgaaaaatacgttgtaaaatagcaccttcatcgttttcaactgctgcatgacaaaatctagactgcttttgtctcgcgtatacaccatatcgtcgatgatgagactgagaaagtgcatggtgtcccatatggtggtaaacgtgtaagtaaaactcttgggctggcacgaacgcaaattgagttctgtggttttgtccataaattctatgcgaaactgttgcaagtccatgtcgggggatgcgttaatggcccattcgatcaactgctgcacctcgtatttttgaatgtctttgtatttcatcaaacacgcaaaatggtataagtaagttgcttgcgaagacaacaatttggtaaggtgcgccgatttagaagctcgcaaaaggtctatgagacgaaacgaatacaacaaatagctgtctttgtaacgagaaaaaagcggcgtcagcggtatcatggcgactagcaaaacgatcgtgctgtatttgtgtcaggcgccggccacagcgtcgttgtacgttagcgccgacacggacgccgacgagcctattatttatttcgaaaatattacagaatgtcttacggacgaccaatgcgacaagtttacttattttgctgaactcaaacaggagcaagccttatttatgaaaaaagtatacaaacacttggtgcttaaaaacgagggcgtttttaacaaacaccacgtattgttcgatgcaatgattatgtataagacatatgtgaatttggtcgacgagtctgcgttcggcagcaacgttattaactattgcgaacagtttatcacggccattttcgaaatttttacgctcagcagtaaaatcgttgtggccgtgcccgtcaattgggaaaacgataatttaagtgtacttttgaaacatttgcacaacctaaatctcattggaattgaaattgtaaattaaaacaaatcatgtggaaaatcgtgttattgatcgttttgctcgtactgatttatctctattggacgaatgcattaaatttaaattccttaaccgaggcgtcgcccagtttagggcagagcagcgaatcggtggaatcagacgagaacaaacgattaaacgtaaagcttaataacgcccgggtggccaatttgcgcatcgcacacggcgataataaattgagccaaatgtatattgccgaaaaaccgctatctatagacgacatagtcaaagagggctccaacaaagtgggcactaacagcatttttctgggcaccgtatacgactatggagttaaatcgccaaacgcggccagcacatctagtaatgtgaccatgacgcgcggcaccgcaaactttgatatcaaggaatttaaatccatgtttattgtattcaaaggtataacgcccactaaaactgtagaggacaatggcatgttgcgattcgaagtcgacagcatgattgtgtgcttgatcgaccccaacacggggccgctgtccgaacgagaggtgcgcgaattgcgcaaatccaactgcactctggtgtacacgaaaaacgaggcagctcagcaagttttattggaaaataactttaccgctattaatgctgaccaaaccgcctatctcaaaaactataaatcatacagagaaatgaattaataaaacaaaaaaagtctatttatatattatttattaacatacaaaatttggtacactagtgttcaaatcgtttctgttcaacgccattgtcatgttataaaacacatttgtagttttattgtaattatttttaaatttatttttaatttgctgtaataaaacttgttcattaaatacaaaagactttgaactacttgcgtttatattctttttataattgtactgaacaaacgagggatgcaaaaagtttttcaaatgctgcacggcaatacttatcatctcctccattttgtcttctcctattgtaatagtagcattgcgcaccgttttaatgtttagaatgtaaatgagcgcatacagcggactattgttggtgctcatacacattaggttgtgcttatgcatagggtcgttgttcagcagcgttttgtatactacaaagcccgttttggggtcgcgtctgtacattagtacgtgcgacaaaaacaaacgcaccggcgtcacaagcgactcgtaatacatgctttctatcggaaactgtttggacttgatgtgttcgtacacggagccggcaaacttaacgctgtctacaaatttatggtttgtgtaaacaattaaaaatctgtcttgtacaccgtcgtcataatcgtccacgtacaacggcttgttgttaacaattaacattttgtagttggcttcatactttagcaacccttggtattttctgctcttggaatcgctcttgctcgaatcggcatgcttcttaaagtacgactcgctgcactgtttcaactcgttgataacgtacagctgcgaattgagtttgctcacttctttgtcgctcgtttccttgttggactctccgctgtggttgtcatcgtcaaacttgtgcatcaacaccaaatagtccaacagctcaaaaaacgacgacttgcccgaacccggttcgccgggcatgtaaatagccttttttccgtaatctacgggaatggctagactagcggcgaaatgcatcaacataatcgcgtttgcgtgattaaaattggtgaaacgtttaaagtacaaatagccttcgacaatcttttttaaataattgtacgagtattctttcaagtccattttggacatgattatgcgcatgtagaatcgagtcaaccaggtgggcaaatcgtccgtgctgcgcgccaatatgattttgtcccaccacacattgtactttttcaggattattaacgcgtcggtgtggtgcgtgtaaaatttgcaaatgttatccgattcttcaaactggacatcgggttcgcgtgcaacatcatcgcgcaactcggttaaaaacaaacgtttatcattaaacttgtccatcaacatgtcaacatattcgattttgtgaattgtttgatacaagtactgaataattttgttgtgttctttaaaaaaaaactctccgtgttggttaacaaattcgctgttcgtgcgaatcaacgtggtcgacacgtacgttttgttggtaaaaattagcatccaaattaatttgctcaattctgcatcgttaccaaacatgtccgctatcaagcagacttttagcgcttttctattgatttttatttttttgtagcatttgcattttggtcgagatcccgacaccgttgaccgacacggtttacatttcaagttgtgcaacatgtcggaaaccttgttcttgtttacgtacaaagcaagcgtaatcaaattttcatcgtccaaattccacaaatcgcgaaacaagttgtttaacgcgactcgcatatcggcttggcatgtgttgcaattgcccatgtagttaactatggccatgttagtttttagcatttttacatctcggcacattttggcgatgtgataaattctataaatgctgagctcgtcggtgctagtagatagcatgtaattaaacgcgtcctcgggcaaatactcttcgtcggtgggcttcttgagcgtctgcggcaacgtggtgcccaacaaaaatggacaattcgaatgaaagctgttggtgaacaaattgtacacaccgtacgttgtcaagtacaagtatttccaattgttaaattttatgttgctcaacttgtaacaattgcttttaaccaatttgaataggtcatcctctttctttacaatttgatagtttttgccgttgaaaaccaaattgactccggtcactacgttttctaattttctaaagaatcctttacacacaatgtcaggcggcaagtttaacgccattacattctcgtacgtgtacgcccacaattcatcgtcatctaaagtttcgtttttagccgacagagtcagatatatcatgtagtgtatgccataataatagcccaacgacacgcacaatttggtatcgtcaaagtcaaaccaatgattgcaggtcctattaaacactactttttcttgttttttgtaaggctcacatcgtttcaaagcttcattcaaaatttctttgtcgcaggcaaataatgattcgcacaaaagctccaaaaacagtttgatgtcggtttctctgtacgagaaattttcgttcttggtcagtatcttccacagtacgtaaattaaaaaatcaaaatttttaaatttgcttttttcaaagtattgttgtagaaggtttggatcgttggcttgttcgtgggtcgccaaaactttaaccatgttctcgtaaattgctataagccccaaattgatttgcgtttgaatgtagtctgcattttcgctgctcgccgatataatgggtacgatgcgcggttttctggaacgcgtgtcgctcaagtccacgtcgtttttgtcaaaattgttgtcttcgaacactctgaggcttttgaggttgacgttgacaatatgcttgtatttgggcaccgtaatgcattcttccaaattaatgtcgtccctaatgtaattgaaaaaatttttatccgaattgaccagctcaccattaactttgcacgtaaccacagtaccgtcggccattttgagtataaacaaatcttcgtgagactcgtcaaacttggtttttccatttacaaacagcgtttgcggcggatcgtgattcgtgcgcaggctgagctcgacgttgagaaaatatttagggtcaaacacgaacaaatccacagggcctagttttttgttgtgtatgattggtatcgtgggttcaatgacaattccaaattttatatttaaaaacagctgccatccgttaaaagagaaagcctgccctttgggccagttgggccaataatagtaatcgcccgcttgcacacatttgttaatgtatccagggtcggtgctcttgaaaaaattttcaaaattaatatatttttgtatgacttcatagtgcttcttcaaaatgaaaggttttacaaaaatgcaaaaatcgttactttccaacacccagtcgtggccgtctaatgtttgttgaactgcctgtttttctgtagcttcttcggtgtcttcgcaagacgagcccatgtcgtgttttgcgcacggaccgttaaagttgtttctaattgtgtttaagaactgttgaaaattgttaacgtactcaaacaatctgcgtgttcctgttcgcgtgtttctaatgattaaatgatttgcatcttgcaagttgttaatctcgtacgttttgtcttcaggcacgtcttttaaaaaaaattgtaaaatgttgtcaatcattttggctatcgtgtttatatttttcgtgttaatttatttaataatttcgatcaaaaatcaccatccatttttacatagaataaaaacgctaataaaagatttcaacaacacattgttgtttggagcgtatatacagatttacgatttaagcacacccgcccgcaccgaacgattgtttattattgcgcccgaaaatgtggtgttgtacaattttaacaaaacgctctattattacttggactcggcgaacgtgttttgtcccaacgagtttagcgtgaccacgttcacgcaatccactattaaaacgatcaacgagacgggaatatatgccaccgcatgcacgccggttagcagcttgacgctaattgaacattttgtaacattaaaaaataacgtgcccgatcacacgctcgttctcgatgtggtcgaaaaacaaattcagttttcaatactcgacattatcaattatttgatttacaatggctacgtggacttggacaaccaaaatgtttcatctacagaccaagtttattaacaccgttggcgtattaacacggtcgccgcgtttagtttgcgtcgaatttttagcaagttataacgtgtttaataaatttaatttaataaattaaaatggctcaagttaaaatcgggcagttcaaattcggccaggacgagttcacgctcagatacgtgctcggcgacgagcagccggtcaagtttgtggccaaggacattgcccgcagtttaaaatatgtaaattatgaaaaggcagtacgtgttcatgtcgatgtcaaatacaaaacgacgtatgagcaagcatgtattaatatcagcaaagaaaatcgcgttaaacacggcgatccgctgtatttgtcaccccaaacaatattactcgacaaaataggcgttatacagctgttcatgcgctccaagatgcacaacgcggcggagctgcaaaattggttttacgaacacgtgttgccccagtgcaccgcgtcggcgttgagcctgctccaagacgcccaagcgacggtaaagtttaattccgctcccgtcgagggccatttctatgcggccacgacgctgctgtacgccgaaaggaatttgttcaagatcggccagactacaaacttgacgcggcgactggctactctgaattgcggccgcgccgacgacgaccagatgcagtacgtgctgcagaccgagcccaccgtgcaccacacgctgctcgaaaagctgatgaaacaagagttgagaccgtaccgcaacagcggcgaggtctactgcacggatttcgaacacatcaagcgcgcgctcgagtcgtgcttgccccactgctcgcaaaactaatccgttcagtttgtttcgcgctttcgtcgaatcgccacgcgtcgttgtaaataaatttaatttaataaattaaaatggctcaagttaaaattggagaatttaaatttggcgaagacacgttcacgttaagatacgtgctcggtgatgagcagccagtcagatttgtggccaaggacatcgccagcagtttaaaatatgtaaattgtgaacgggcaatacgtgtccacgtcgacggcaagtacaaatcgacgtttgagcatgccgaccaaatccagcaccatgctccagatagcgtggcaaagcagggcgacccgctgtatttgcacccacacacagtgctcattaccaaatctggcgtgattcaactgataatgaagtccaaattgccttacgccatagaattacaagaatggcttttggaggaggtcattcctcaagtgctatgcacgggcaagtacgcgccggccgttgaaatggatacaaatgatgttattgccaaaattgacgatctgacgcaaaaattgacggtggccaacgcagatttggcggaagccaaccgatcgctcattttgtttgccaacgaaatgattgtggctcgacgcgacgctgaaacggctcggcaagattgcgaaaacgcgcgccgcgaaacggcgcagctggccaaccgcatggcggacattgcgcaagacgtgatagccaaacccagcaacccgcagctgtgccacagcctggccgtgtgcgacgtgggcaacaacgagtttgcgtttctgcgcccgcaaaaacgatcgctgggccgcagcctgaaacgattgggttctaacgacgtcatctttagcagcgactacgtgcccaactccatgaacgtgctaaacaaagtaaaggaagccataccgcgcaacaagttcaaagccaagcacaaccgcatcacgttgctggaagactacacgcgcgaggagctaatgaacgtgatcggctccactatgaccgaccgacaaattgcgcgcatgaacagtttgcgcaacgcgcaataaaaatttttatatgtcgtcaagcgtttaagcattgggtgaccagcaaagtgctttcgtaatgcataatatatactgttttttaataatgcataataaataaaacattttgtaatttaatactgttttttattaacctaaaaattgtacatgttgtcgtactctatcaagttgtcgattatctgttcgtgataattgtgccagtcgcgcacaggggtggggcatcgtttgactttgacgtagaaatcgtacgcgtaattattagttggcagatcgtcgacaagtgtgattgacttgaaaaagtttacatttttatcgctcaaatatttaattacaatttttggtgatttgggtatattgttgtcggatcgatgattgtgaatgtcaaaaacaaatttattttcaataaaacgcttttttaaattgtaatctacaatagcgttgtgtgaattttgaactaaatcagagcgttcttctcgaacggtggaaccttcgctgataatgatatcaaaatagccttccaaatcggcgtctcgcatcgagtgtgctacatgatctctactgccatacgaccacaagactaaaacgcaacccatttcgtgcaattcctgcaagctgtcatacacaaacgaatctcgaatttgaatttgctcctcttcggttatgagagtgctgtccaaatcgaacacgaccacgtgcggaaatccccacgtcaaagattcgcttttgagagagaccactttgtagtgtggcaacagaaaccattctttaagaaacgaatacattggcggtttgttgctaagcacacacatgtggcccaacactggcgttttgaatgcgcgtttaatattgtgcctgatgtcgcacatgttgtcggcgggcgctttaaatatttgcatacagtaattgtagttgttttctataatcttgcacaggtgcgggtcgttgcaaaattgaaatattacatattcaaaaaatttatacttttcaaagccaaggtatttgaggtctgcgtactcgcttaaaacgagaacatgtcgtttaatgatggcgtcgttaaggcgcaaacagatccatttgctttgaagcgaggaggccataatgtgcaaaaatggaccagttacgccttatttaaattgtttaaagagtttcgtataaacaaaaactactctaaactaatagattttttaacggaaaattttcccaacaacgtcaaaaacaaaacgttcaacttttcgtctaccggccatctgtttcactcgttgcacgcgtacgtgcccagcgtcagcgatttggtgaaggagcgcaaacaaattcgattgcagacagaatatttggcaaagctgttcaacaacacaataaacgatttcaaactgtacactgagttgtacgagtttatcgaacggaccgaaggtgtcgattgctgttgtccgtgccagctattgcacaagagtctatttaacacgagaaattacgtaaaaaccctaaattgtaaactgtttgacataaagccgcccaaatttaaaaaggaacctttcgacaatattctttacaagtattccctaaattacaaaagtttattgttgaaaaaaaaggaaaagcataccaacactgggtgtacgcgcaaaaagaaaatcaaacacagacagatattgaatgataaagttatttatttacaaaacagtaataaaaataaactatttgagcttagcgggcttagtttaaaatcttgcagacacgattttgtaacagtcgaaagccaaacgagggcaggcgacgaaatcgcttcgttccttcgctactgtcggatgtgtggaatgtctggctgttaatagtagcgtgttctgtaacttcggcggcttgtcaatgaacggctcctggatcttctgtatgtgcgaggtctacccgggcggcgtctgtaacccgagcttctgcgtctgcgtgtgataccggctgaagaacggcgccggcgtgtcaaaccatatgtggcaccggttgaagaacgacgacggcgacgataaaccatgtttaaattgtgtaatttatgtagctgtagtttttaccttattaatattttttacgctttgcattcgacgattgaactcccaaatatatgtttaactcgtcttggtcgtttaaatttttgttgctgtgtttcctaatattttccatcaccttaaatatgttattgtaatcctcaatgttgaacttgcaattggacacggcatagttttccatggtcgtgtaaaacatggtattggccgcattgtaatacatccgactgagcgggtacggatctatgtgtttgagcagcctgttcaaaaactctgaatcgtcgcaaaacggaatttcggtaccgctgttgatgtattgttgcggctgcaacatttgtatcttctcgccgcgctcgatcaacaattcttcaagagtggtgcgtttgtcgcgctgtgaagccacgttttgtaacagcactattttcgcgtatttcataatcggactgttgaaacaacgtgcaaacgacgaccgcataatatcgacggtcgtcaagtcgactgtggtcgaaggcatctccaacagagatcgcacggcgtccaacagcgtgtccgtttgaacctgcgtcatttgcggtctgcacgtgtagtcgtcaaacgtggtttcgagcagtttgaacaacgaatgatacttttccgatcgcagcaaaaatatcatggtcatgaccacgtcgctgattttgtattctgtagaactggtgctgttcaacgaatagtgatggattagtttgcgagcagcatttctgtatcggcgcatgttgatcagctcttcggaaggctgcgcaggcgcgacggcgttggctcgcgcaaacaaatttattacgggacgcggcgtaggatgggcggacgctggcgctgcgacgacgacgcccgcgtttcccgccgcgtactgagacgctatggcagcgttgttatttaaaattgtgttttgcgatttgcgagccacgtgcattataaaatttatcaacacgtcggtgttcaactgcacgttttgatgttcgtcgcagagcaaaggaaatatctggggccatatcgccaattgcataggctcgtctatttttaaccgcaatttgtttatttccaaatacaacgcgatagcgctcatcgtgaccgacgacgcacacttactctgtaactatcacttggatcgtgttgtcgtaaacgctccccaaaaagtctaacacgttgaccgtttcgattctattcaacttaattttggtctcgttggcttgcatcggttccaacagattgcgcgctccgacagattgagtagacaaaatttttaaactttcagttttattgggcgtaatgtcgttgattaacaacgacgcggccgtttgagaggccgtggtgttgatggtttgcaacatgtcgacggccgccatttgcgtttgcgccgaagggtttgccggcggtctgttgcggcggcttcttcgtgtttgcgacatgttgttgccagtgtccatatcatcgatatcatttattgaagcaatcatggttgagttcgataagcagagatatttcgttgtccaattggtacttggtaatgatgtgccttataaatgattcgggcacaatcatttctgtcattagcacgttacaaatatctattttgatcaatttcaatttatgaattaacagattaatgttttcgtccgaatacttgctcatgatgaaacgacaaacgttgcggagttccaactccgctaccggatacgctttgttgggcaaactctctaaatagtgtctcaaataaaagccgatcaatacggtggacgctattttgttaacctttttcatgttagtattgcggcccatttttatcataaagtttttaaacggtagcaacagtctgtttccgttagcagcggtggagaaaccgttgcattgcgcgttcaaaatactcaacacgcgctcgtgatcctcttggcgcaatccgatggttgcttttttgcattctttgacaaatggcacgcacatgtcgcgttttgtgtacaaagaatacgctttgtcgcaaatcaagttatagaaaaattgcacaaatatctgtgtaatcaaattgttttcgttaataacgtcactttcgtttttgtaatcggtccgaagcaacacgtacaacatgagaggcatgccaaacatgggtcttaaaaaaatgtcccaaccattttgcaagccctcgtcgagggtgctcagcgaggacgccaagtatctgcatttgcactcgaaacattgaattttgtttgcgggcttgcacgactgacacatgatctcgtccacgtcgggtgccggcgtcggattgtaatatgtttgcaagtattgcataatggtcctaaattggggcacttgtttgatgaactcgtcgcgcaaaaatatcgaaaaaatgttttttacattgtgtatgttgtctgtgttgttggcttgattctcaaaactactttttatggaaacaatacatttgttaaattctgtaaaaaaagtaagacctttaccgtccacgatcaagctttggttgaaatattttgaaaataaaaaacacaacgaatcgatttcatctcgtaacaattgcgcttcaaaacacacgttttcgaagcggtcgtacgtgttaaaccttaaactgtattgtaatctgtaagcgcacatggtgcattcaatataaccttataatatgaacgattccaattcactgttgattacgcgtttggcagcgcaaatactgtccagaaacattcaaacggtggatgtgattgttgacgacaaaacgcttagtttggaagaaaaaatagacacgttgaccagcatggtgttggctgtaaatggtctaccgcaatcgccgccgagggtatcgtccagcgacttggccgcatcgagcattaaaaataatagcaaactggtgggcaacgattttgaaatgcgatacaatgtgttgcgtatggctgtcgtttttgttaagcgttatcccaagtattacaacgagacgaccgccggtttagttgccgaaatagaaaataatctgttgcaatatcaaaattatgtaaaccaaggcaattatcagaacattcagggttacgatagtttattaaataaggcggaagagtgttacgttaaaattgatagactttttaaagaaagcattaaaaaaatcatggacgacacggaagcgttcgaaaaagaacaggaagcggaaagattgagggccgaacaaactgccgcaaacgctcttctgaacaggcgagcgcagacgtccgcagacgatgttgttaatcgtgccgacgccaatatttccacggcatttagcgatccgcttccaggttccagcgcgccgcggtacatgtacgaaagttcagaatcggacacgtacatggaacccgcccgacataccgccgaacattacaccgatcaggacaaggactacaacgcggcgtacactgccgacgagtacaattccctggtcaggacggttcttttgcgtttaatcgaaaaagcgctggccactctaacgaatcggttgcacataacaactattgatcaattgaaaaagtttagagattatttgaatagcgatgctgatgctggagaatttcaaatatttttaaaccaggaagattgtgtgatgctgaaaaatttgtcaaatttagcgtcaaagttttttaacgttcgttgcgtggccgacacgttagaggtaatgttggaagctcttcgtaataatattgagttggtgcagcctgaaagcgatgccgtacggcgaatagtcataaaaatgacgcaagaaattaaagattcgaccacgccgctgtacaacattgccatgtacaaaagcgattatgacgccataaaaaacaaaaacattaaaactttgtttgacctgtacaacgacaggctgccgattaattttttggacacgtccgcaaccagtccagcagttcgcaaaactcccggcaagagatctgcggaagacgatttgttgccgactcgcagcaacaaacgtgccaatagacccgaaattagtgtaatatcgtcagaagacgagcaggaagacgatgacgttgaagatgtcgactacgaaaaagaaagtaaacgcagaaaattagaagacgaagattttctcaaattgaaagcattagaatttagcaaagacattgtcaacgaaaagcttcaaaaaattattgtggtcaccgacggtatgaaacggttgtacgaatattgcaactgcaaaaattctttagagactttaccaagcgccgccaactatggcagcttgctcaaaaggctaaacctgtacaatctcgatcatattgaaatgaatgtaaatttttacgagttgctgtttccattgacactgtacaatgacaatgataacagtgacaaaacgctttctcatcaattggtaaattacatatttttggccagtaactattttcaaaactgcgctaaaaacttcaactatatgcgcgaaacttttaacgtgttcggcccgtttaaacaaatcgactttatggtcatgtttgttataaaattcaactttttatgcgacatgcgtaattttgccaaattaatcgacgagctggtgcccaacaaacagcccaacatgagaattcacagcgtgttggttatgcgggataaaattattaaactagcttttagtaatttacaatttcaaaccttttcaaagaaagacaagacgcgcaacacaaaacatttgcaaagactaataatgttaatgaacgcaaactacaatgttatataataaaaaaaaaattataaaatatttttaatttttatttatatgcgacacaaatggataaatttgatggtacacaattttattttcatcttcgggcattacgggtccgcgttcatttaacgcgtacatgacaatgttgtggcgaatgtcggtgcgctctggcggttctggcacgtggtgcagtctgtcctgcaatcgttgcttccattgttgaaaatattcggtccattcttgttgatactcgccgcgttgcatgagttttacgtacaattttaaaagtttgacattttttacaaataacgttagagtttcgtcgattttgtacactccattatttttgtttaaatccaatacatttaaatcgttcactaccagttgattgtttttatccatcgcaatttttatctcatcgcctacgttgaacagcatgtttaaaattttggtagatttcggcgtacgtttataatctaaataatattcaacgtacacgtaattgaacatgagctgcaacaatcctttggcattgttcaaaattttgtatctcatcaaattataaataattttcaccatcgacaccgtcatcagcttagttacaaacttgtacaattgcaagttttcaataccatatttgtctttaaaatcttcacgtttactgaacatgcccaattcgggagattttccagtcaaaatgccaattaatcccgtgtacaaatcaacgtatttgacatcgttgcccgattcatcttttgcatgtcgattttttaaaagctctttattgtcgataaatttttcaaaagtctctcgattacatttagtgtaaatataatagtcggtgtcgctgctttcgaccgcatatcccttggcatggctgcccgtatcaatgcaaatgtacaccatgttagcagcgttgcttactgtgcctgtatcaagccttatatgcctcaaaatatttcatatttttgcatcaccgtaaaatatacatgcatataattgtgtacaaaatatgactcatcgatcgatcgtgcgttacacgtagaattttactcgtaaagcgagtttaattagagccgtgtgcaaaacatgacatcataacaaatcatgtttataatcatgtgcaaaatatgacatcatccgacaattgtgttttacaagtagaattctactcgtaaagccagttcagttttgaaaaaacaaatgacatcatctcttgattgtgttttacacgtagaattctactcgtaaagccagttcagttttgaaaaacaaatgacatcatctctcgattatgttttacaagtagaattctacttgtaaagcgagtttaaaaattttgtgacgtcaatgaaacaacgtgtagtattttttacaatatttaagtgaaacattatgacttccaacaattttgtggatgtagatacgtttgcaagacaactgattacagataaatgtagtgctctaatcaaaaatgcggatctgttgccggcaaacattttagagattgtagaaaaggccagagacaggtattttaatgagccaactcaaaaaaactatgaatacattaaaaaattatttttacgaacaaaatacatggacgattcgatagattataaagattttaacagacgcatcctattgatagttttcaaattcgctttaaacaaaagcgccagctactttccatcgtacaaagaaatcatcgaggtggccattaaacgtttaaacaaaattaaccccgatttaaagagttctccgcgcgcaatgcttcagcattacaatgaatgcttggaaaatctagacaatccagtcacggacgaacatcatttgttaacatttggaaaagaagttgctacaaaaatattcatcgaagcgtttgaatacagttacaccaacactaatgccatcagcatggacaagacagatgaatttgattttattaaacaaccgacattgaaatctttgccagatgcaagaccgccatcgcttttgaccagcgtgatgaatgaacgtaaaagaaaattgcaaaacaccaactcaaaggcaaaatgtttgctaccagcaccaccgtcaccgccgccgccgccacaattgcgtaaacttgaaaaaaagaatcatttattgcctttgttttctttgtaattatgttgttgcatttctatttctaatatcataattttctaataaagtagtttcatatttttgtttttgtacagtaactgtttcttggtttaacaagatcacaaccaataacataaagaataacacaatcataacaaaaattaaaaacccgcacactactaaaacaaattctttaattagcgatcggtttctatttacaaattggccaagttgatcgccttcagtcggcgagttgttggcttggatgatatcgacgatattgttgccggtgcgaccgcccgtcactcttgatataatgtcggccgccgtcggtttcataatgtgcttcttaactacaaataatagttgtacttgatgggcgtcaccgtgacgccgctgctaaaacctccgtctattaaaacgcgttgcgttacaaaattaatgtttgtccgattaacgtagtcggaataatcaaacgcgttgttggacggactaaaatcgggcatgttgatgggcacaatgccgttagagctgatagcaatgctgtcgtttttgcaaaacagccgaatttttttgtaggactctgctttatttggcgcaaccgacattatctggtcaaagttgttcaattttatgattacgttgggcaccaattgataggggaaaattattttttggaacattttgacaaagtccacaaccgtttggctatagtcgggaatgccgagcaaagactgtgcctgtttaatgtatttgagactggagcggtttactgtagcgcaattggatggcacgtcgcccttcataagccggcgcgttctctcccaattcaatttgttgtacaaattatcaatttcctcgtgcggcagattgattacatagcgcgcgggctgtttgcgatattgaaagatgcaaaaaatgcgtttcaacgacaatatcttcaccatggtggacgtttccagattgaaacataataaaaagtcattgctttccaccaactctttaaaatgagacaacggaatttcacaagcaatcggtcgcaaattgctttttattggaggcggaacgctttgaccgttgcggttttttagtaacgcgctgcacgcagattgcatatccgtttcgggatacgtaaactcaatgggacatttggggttttcatgctggatgatcatagtgttgcaataaaacaagttgttggtcaggagcacgctaaaaacgcgcgtttcgcccgcaccgatttcggtgatgggcattaacgggttccagtacactatggtggcggacgctgttttttttggcgatcgactgtctatattaacatcatgctcgtgcctgtacactagcacagaattgaattttggaaattgttttttgtcaatgtacaaccgatcgtcgtctgtgggcacgtacacaatcaagttttcgattaatttgttgcctacgtcgctttgcggttccaccaaattgtgaggaaacgcaaaaaagcgatcgctaatacaaacttgaatctgaaacgggcattccatcgcgatgtatatgtcttacttcattagactttagattttaatttgtgaactcgtaccgtattcaatagggtatcgggcacgtaattgtaatggtaaaacagatcccgttgaacacgtccgttgttcactacgattgaaatgcaaaaatacatcgcgtacataaacactatgattagaaaaatagcagatagaaaatatttcatctttaaatcttatgctagttaaataaaacacataatacttttatacgtttatttatatttgttttctttgttataaccgcgattgtaaaacttgtgatcgtgctcgccaggcatattttctttgcacatcagcttgcgaacatatgtgatattttcgtaaaccgattttttaatgttaccatcgtgtaacgttgtcggcttgagaggtttgcggttgttgttgtaaaaattgtgcaacgaataattatccatagtgcagcacaggcaatatcactgatgcatatgttttaattttttattgtattcagttattatatgatttaataaacgtacataataacacgtttatcgatactcacatttgattttatcattcgtttttcaaaattgaactcgctttacgagtataattctacttgtaaaacacaatcgaaagatgatgtcatttttgtacgttattataaacatgtttaaacatagtgcattgaacttaatttttgcaagttgataaacatgattaatgtatgactcatttgtttgtgcaagttaataaacgtgtgattataaacatgtttaaacatagttcattgaacttaatttttgcaagttgataaacatgattaatgtatgactcatttgtttgtgcgagttaataaacatgtttaaacatagttcattgaacttaatttttgcaagttgataaacatgattagtgtatgactcattgtttgtgcaagttaataaacgtgattaataacatagttcattgaacttggtttttgcaagttgataaacacgattaatgtatgactcatttgtttgtgcaagttaataaacgtgattaatatatgattcatatgtttgtgtaaaaatgatgtcattgtacaaactcgctttacgagtagaattttacgtgtaaaacacgatcacagcacttcgtagttgtatcgaaaattgttcaagggctctttgttaatgtcgtaattgattaatatgtcgtacagtttggcggcgctgtgtttgcacacaatcgtttttaattcttgaaacattttttcgtgtatgtttagcatgttgtatttcaaagtgcgatgtgtaatgctggtgacgagcatcaaaataataaaatctaaagcggctaatttgtaatcccgttcatacgctctgtaatcgccaacaactctgtggccagatctttttagattttgacaggcgttatggtacgaattgataatatccactatagtttctcttgttatcggtttgtcgattagactgttaacaaacatcacgttgcccaagcgcgacggtttagataccgaattgttttttgtctgttcaaatttgtacaaattaaaaacgctcatagactggtcgtcaggcagcgtttcgttatacaaacaaaacggtaaagcgtttaattcgacaaacgacgagcacattaaagtttgttggctgttaacgtcctggggatgtaaacggttattcataacgtaacacacttcaatgtcggaatgcttgttttcaaatttgtccttgtctacaatttcaatggtgattgagcgaggtttgagtttattttgtaaattcatttggatattttcaatatggtataccaccgacagattgtgagccagggatccttgattggttttaatcatattcaaaatattcatgatatagttgaaaaaagaatctgtcaaaacgcatgtgtcgttgttaaatattgctttccaaggtttactgttgcgtgactcaacgacggccgtgtaacataacaagcgcgccagttgcatgtgcgacaatttaatgttatcaatgtcggtgatgtttggcaccagattttcattgccgttttccagtagcgtgttcagttcggtcgagtagttattcaacgatcgattgtgcgattcaaacaagtttactatcgcaggttgtacatagttttttacgtcgtcaaattgaattatatcgatcttgtccgtgttttccagcataaacgacaaattttttaggtcgaatttaatatttggcacgtttttgttggactttttgtaatttaacaacatcgccgacagtttttgtaactcgccgttagcttgatctttgctaaacagtttattggtggcgtaatttacgttgtcgtttaaaaacaacaattcattgatgatcattttttgtaaaagcgcgtacttcctcatgttgacagaatctcttacatttcagttgtaaacgcgtctatacaaattggccaagcgattcggaatgcacacggggatcgtgcgagccagcgccgtttggcgaaatagcattttttcatagccgctcgaacattcgcacgcgtccggcgaaaattgcaccgtgtccaaattcatattcagccgaccattgttgcatagataaggcctcggcgttcccgtatcgtccaccaagtctctgtacgtgctcacgcatgcttgagacacgacaaaatctccgcctgcggagaaaatgtgaagcaagcccagtgcgggatcgcattctatcaagtccggagcctgtgcgtttagcaaagcgttggtggcgttacaaaaaccatcctggcaggtcaactcgcttgcagcgctggaaatcacgcagttgtctctacactgctgatccgtcacgcacggtaaccggttcaatgaacaatctacgcctcgattgtgctgaaacgtaaaatttaacggtggcgcttccaactcgttaatgcgcatgtgtgcatcttgcaaaataaaattttgaacaaatttaaacgtgtacatgtaaacgattaatataattatcagtaaaataagtatttgccaaaagttcaacatgatcgtcttaattgagtgtgaagagtgtggtgtgacgcacaaaatgcctggttgcgcaaaaaataaacctgggtctatataactcggcgtcggccgagtttatttttaacattatgcatctgacggctaatgtattgcttgttcctaacgcgctcaaaaagcgggacgtgaaatacatttataatacatatttgaaaaattacagtgtaattgaaggtgcgatgtgttgcaatggcgattgtttggccgttgtggtgttggaccgaaatcagctgcaaaacacggacatggaagtgttggaaagtttagaatacactagtgacaacgttgaattgttatgcaaaaaagtatgtgtgatagttgataattacaacaagtattaccaaaaaaattgtgtataaataaataccaaattttattatatcattttgttttatttaataattaaagaatacaacgccacatctatattcctaatacaacaaaatatctcgtacgtacaaaaatactcggacattctccaataagtaaaatgcattttgctattatactgttgtttcttctagtgattattgcaatagtgtacacgtatgtaaacttgatagatgtgcaccatgaagaggtgcgttatcctattgcggtttttgacaacacgggcgtgccgctcattgaaccgccgtccgaaataataatcgaaggcaatacacacgaatgtcacaaaactttgacgccgtgctccacacacagcgattgcaatctgtgccgcgaaggattagccaactgccagttgtttgacgaagatacaatagtcaagatgcgtggcgatgacggccaagaacaggagaagcttattcgagcgggagaagcctactgcttggctttggatcgagaacgcgcccgatcgtgtaaccccaacacgggtgtgtggttgttggccgaaactgaaactggtttcgctcttttgtgcagttgcttacggcccggacttgttacgcagcttaacatgtacgaagattgcaacgtgcccgtgggctgcgcgcctcacggccgtatcgacgatatcaacagcgcttcgatccggtgcgtgtgcgacgacgggtacgtgagcgactataacgccgacaccgaaactccgtattgccgtccgcgcaccgtgcgcgacgtaatgcacgacgagagcttctttccgcgggcgccgtgcgcagacggccaagttcgtctggatcatccgggactcaatgatttttaccgcagacactttagactcgaagacatttgcgtgatcgacccttgttcggtggacccgattagcgggcaacgcacaaggggacgcttatttcaccatccaatcgacaaaggtgtcaacggaatcaacggatgcaattgtccggtctctgacctgttactgcccgtgtttaatcgacacaccgccgaaacgggcatgattagacaaagcgaccgcaccgtcgcgaacgcttgcttgcgaccgtttagcgtgcacatgttaaggttgcgtcgtgtggattacaaatatttctggggccgcagagaccacaccgagttttccgacgcggatgtggtgtttcaagcgaatgccaaccaactcagtcacgaacggtatcaagcgattttgtacccgttgctaggttcaacagaaatcgtaccagctggcacgggtgtcatgaaaatttccgtgtcatacgataccacattgaaagatatgcgattaccattttctatttttaggatatttagacttaaagaaagtagcacttctcggtcgtcatgcttctttccaggcgtaggacggtgcatacttgccgatcccgatgcgtgcatcaggcgacacggtggatttttcgtgtggaccgcagaaacgtttaccaattcgtggtgtatattaagtcgtgaagatacgcatataaaaatttggagtagcgcgtcacgatatccacgcggagacgcgcctgcagtgttaagattgcgcgacttttttctggacgaccgtcgcgaacaaaacacaataagaacgattactacaggcgccatgacccaagggcaacaaatagacgcattaacccaaatacttcaaacttaccccaactactctttataataacaacatgagcattttaaacgttgtagaagcgtgcgatttggcacacacttttttaaaattgggttatttatttagggccaagacttgtctggatatcgctttagataatttgaaactgttgcgtcgaaaaactaacataaaggaagtggcagtcatgctaaacaaaaaaactacagaatgtttgcaattgaaacaaaaaatagataaaaaaattgcacaacgtattttaataaaaatttacactatcaaatgatgaaatcataacgagttcaatattttgtgtgcaaaaataaatgacatcatattttaaacttgttttaccagcagaattgtacgtgtaaaacaagtttgagatatgatgtcatcatcacaaataatagtatgtaataaaataaacatatttgtgtatagatataatttattacaaataaattttacattgaatcaatttgtcttcgtgtttgttgtaaggtcttcgaatcttgtgtttcagcccctcgggatggccaaaatgtgccgtagtttttaatggatctctcaatgattttctgcccatagcgagtgtgacaaacgcggccacgacaaacagcaggataatcagcttcatggtgttctatattcgacaatatatgggtcgcttttaaatcgccttgtccccaaaaccctcttttatagtttttttagaacccgttgtgtattccaacagtaattgttccatctctttcaacagccatttagcattaggtcgttgactgtaatcgtgctgaattaatttacaaacaatctcggtcaatttaggatggctttgggataaacttgccggcatttgctgtacgttgtttctaaagttagttagcgtagtttcgcgttccaaagcagtcttgaagggcattattaattcgaataaaacaatacccaaactatacatgtcattttcgggggtgtacacttttttgatttgttctggtgcagcgtacaaagttatattttgagggttgtttttgataaatgttttgtatagactgccaaacatgccgcccacatacaaatcaaagtcgggcccagtcatgaaaatatcttcgggattaatattgtggtgcacgatatttacggaatgaatcgcttccacggcgctcaccaaatcaacaaatttgctaatataaaagccaaaatctgcaggaactttaatgttggtctttgcaaaaatttgcaaattgcgctgtttcaaatagtcgctcaacatgtactcgtttagaggtgacgcaaaatatatgcggtgatgccgcggattcaaatataccaattgttcgggtttcatggtatacaattaagtgttaacgcgtcactaaattcaaacacgagctcccacgccctatatacatacaatttatcgcacaagatgtttaacgcgatctgtttataaactaaaacgcgctgcaataaactttagtaagcatttgtatataatcaattgaattgtgcactaatataagaattaaaaatgggtttgtttacgtgttgcacaaaatacacaaggttatcgaccgacacaaaagtgaagtttccctatgctgcgttgtcgtacattaacgtgacgctgtgcacctacacggccatgttggtgggatacatggcaacattcaacgaatttgaatatttacaatactggtttctgttgtcgtttttgatgtccgtggcgctaaacgctccgactttgtggacggcgttcaaaaccacagaagcccatgaagtagtttacgaaatgaagctgttccaagccatgtactttagtaacgtgctgttgaattatgtggtgttttcggacaatcaaatgggtacaaattttgtttttgttaacaatttaattcactgttgtgtactttttatgatatttcttgaattgcttattctattaggccacacaatgggcgcgtacacggattatcgatatgccaaatcatgttatatggttatattgtttgtttcagttatgagttttactattgttatgggtttagaatgtttgaaaacgaaactagttgatagcagtttgatgtttaactcgtttatgtgcgctttgtacattatgattgcaacagtgtggtctttaaaaaataatttgactagtttttacgcttcaaatttacaaagtattcaagttgttccgttttcatacaacgatccgccgccaccgttctctaacattgtaatggatgacataaaaaataaaaagtaatttataaaaaaaatgtgttttttatttttctacaattctgtaaattataaacaaatataaatacaaagttattatgttgtcgtctaaataaacatcaatttgtaaatctggacacctattcatatcattgatattacagtctactatacaacaatcaaaacaatttaaataatcttcattgtcgtcgtataaatttatttgcactgtagacggtgttacacagcgatccatttgacgttcgtgttcaatcaactttctcgccaacttgtaccataaaaattgtttggacaaaaagttttccaacgatgttaacggccgattcaacgtgacgatgcgcacgtcctcgggtatgcatttgttaaaaaacgcacaactcgctttaccaaacgaaagcaaaggtactaaatatggcgtgattggctgatttgttattccaagataattacaaataaattgatccgtcgtgaagtgataattggcaggtgtcaactttaaataatcttcaacgttgttgtcgcgcaaaagtctgcattttacacgcgttgttaatcccacaacttttgcatgtgaaatcggatccaaatactgcagaatcgtgtctataatttctaatggtaaacgtatgcgttttgctcgtgcgcgctttgtaacgctcgacatcctaataacaactgcacacaaatgatacttgcttttacagttcatctctaagtttaaactgtgcgttcatcgcgttgagcaagtcgccgttatcggcatcaatctcccaagcaaacaagccgcccaatttatttcggtcgacatatttaacttttcctaacacagagtcgacgctgtcaaacgaaatcaaatcgcctttacttttatcgaaaacgtacgacgcttgagcggcgctgtcaaacgtgtacacataattgttgagatctttttgaatttgacgataatctacaacaccgtcctcccacgtgcccgacaccggcccgttgccagtgccggaaaaatagttgccattcgtataatttgttacgccggtccagccgcggccgtacatggcgacgcccacaattattttgttgggatcgacgccttgttccagtaacgcatcgacagcgtaatgtgtagtgtacagctcttccgagttccaacttggcgcgtagactgttgtttggtagcccaaatccgtgtttgaccaagcccctttaaaatcgtaagtcatgagaaatattttgtctaatgacttttgcgcttcggcgtagtttaccacggcaatcttgtcgtagcccgcgcttatagcgcttgttaattcgtaaaccctgccggtttgcacttcgaggtcgtctagcatttcgcgcagctcatccaacaacagaatgtatgttttggcgtcacgctccgcatcgcccagcgacgggttagcccctttgccgcccggaaattcccaatcgacgtcgacaccatcaaaaaatttccacacttgcaaaaattccttaaccgactctacaaaaacgtttcttttttcaacgtcgtgcatgaaatagaacgggtccgacagagtccagcctcctattgaaggaagaatttttagatgtgggtttgctaatttcgccgccatcaattgtccaaaattgcctttgtacggttcgttccaagcggacacgcccttttggggtttttgtacggcggcccacggatcgtggatggcaactttgaaatcttcgcgtcccctgcacgatcgttgcagagcttcaaaacttccgggtattgttttgagggcgtcgtttattccatcgccaccgcagatgggtatgaaaccgtacaacaagtgcgataaatttggcaagggaactttgtctacgggaaagctgcgcccgtacacaccccactcgacaaagtacgcagcgacaattttatcctctcttctgccgggtttgttgttttccagccatgtgtattcgagcggcgccagatgaccgccgtcggtgtctgcgattttgaccaacacgggatcgcttatggaacagccgtcctcattgcaaagtttgacacgcatgttaaattgcccgctcacaataacattaatggtagcccttttactgtcggcgtcgcctttccatacctgctgctcgtcaaagaacacgtacgctatgtcgccaatgtcgccgttccatacgttccaactgacgtgaacgtcgacttgttctttgagctttattaaattttcgtaagcggtggcctcgtaatttatttttacgagcgcataattgcgttcggcccaatcgatcaccggcgtgccgggaatcgcgttggaaacggcgaccaccaaccacaaaacgtttaacaatttgtacaacattttaatttgtcttaattttaagatgtaattattttatgtaaaaaaaaaatgaacaaaattttgttttatttgtttgtgtacgccgttgtaaagagcgcggcctacgatcctttgaaagcgcctaattattttgaagaatttgttcatcgattcaacaaaaattatagtagcgaagttgaaaaattgcgaagattcaaaattttccaacacaatttaaatgaaattatcaataaaaaccaaaacgattcggccaaatatgaaataaacaaattctcggatttgtccaaagacgaaactatcgcaaaatacacaggtctgtctttgcctactcagactcaaaatttttgcaaggtcatactcttagaccagccgccgggtaaagggccccttgaatttgactggcgtcgtctcaacaaagtcactagcgtaaaaaatcaaggaatgtgtggcgcctgctgggcgtttgccactctgggcagtttggaaagtcaatttgcaatcaaacataacgaattgattaatctgtcggagcagcaaatgatcgattgtgattttgtcgacgccggctgtaacggcggcttgttgcatacagcattcgaagccatcattaaaatgggcggcgtacagctggaaagcgactatccatacgaagcagacaataacaattgccgtatgaactctaacaagtttctagttcaagtaaaagattgttatagatacattatcgtgtacgaggaaaaacttaaagatttgttaccccttgtcggccctattcctatggccatagacgctgccgacattgttaactataaacagggtattataaaatattgtttcgacagcggtctaaaccatgcggttcttttagtgggttatggtgttgaaaacaacattccgtattggacctttaaaaacacttggggcacggattggggagaggacggatttttcagggtacaacaaaacataaacgcttgtggtatgagaaacgaacttgcgtctactgcagtcatttattaatctctcgctatttggaacataatcatatcgcctaagatattttgtaattaaatatacaattaaaaactatacaattttttttattacaaataatgatacaatttttattattacatttaatattgtctactattacggtttctaaccatacagtacaaaaataaaattacaataaatacaattacaaaagtggctacatgaccaaacatgaacgaagtcaatttggcggccaattcgccttcagccatggaagtgatgtcgttcagactggtgccgacgccgccaaacttggtgttctccatggtggttatgagattgcttttttgttgggcaataaacgaccaaccgctggcatctttccaactgtcgtgataggttgtgttgccgatggtcggaatccaaaattcgacgtcgtcgtcgattgctagttccttgtagttgctaaaatctatgcattgcgacgagtccgtgttggccacccaacgcccttctttgtaaatgctgttgttgtagcaattactggtgtgtgccggcggattggtgcacggcatcagcaaaaacgtgtcgtccgacaaaaatgttgaagaaacagaattgttcatgagattgccaatcaaacgctcgtccaccttggccacggaaactatcaggtcgtgcagcatattgtttatcttgttgatatgcgcatgcatcagctcaatgttcattttcagcaaatcgttttcgtacatcagctcctcttgaatatgcatcaggtcgcctttggtggcagtgtctccttctgtgtacttggctctaacgttgtggcgccaagtgggtggccgtttcttgacttggtgctcgactttacgtttaatgcatctgttaaacctgcaattccacgtgtttttagaaagatcatatatatcattgtcgatcaaacagtgttcgcgtgtcaccgattcggggttatttttgtcatctttaatgagcagacacgcagcttttacttggcgcgtggtgaacgtagacttttgtttgagaatcatactcacgccgtctcgatgaagcgcagtgtccacggtcacgttaatggggttgccctcagcgtccaaaatgtatacctgacactcgtcggtgtcgtcgtggcactcgagcctgctgtacattttcgaagtagaaacgccgcatcgccacgatttgttgcacgtgtggtacgcaaagtgattgttattctgccgtttcaccaactctttgcctttgacccactggccgcggccttcgttgtcgcgaaaacactcttcgctgtcactgccccaacggtcgattaactcttcgcccacctcgcactgctgcctgataccccacatgagcaaatcttctttgcccacagtcagcgttttcatggattcttcgacgcgtgtgttgggatccagcgagcctccgttgtacgcatacgcctggtagtaccccttgtagccaataatcacgttttcgttgtagtccgtctccacgatggtgatttccacgtccttttgcagcgtttccttgggcggggtaatgtccaagtttttaattttgtacggacccgttttcatttgcgcgttgcagtgctccgccgcaaaggcagaatgcgccgccgccaaaagcacgtataaaacaatagcgcctaccatctcgcttgtgtgtttcttatcgaagccttggtatgactgatttactagtagcattgaggcatcttatatacccgaccgctatttggccacgtgacacaaggcacgttgttaaattaataattctatctttttatcttaattgtaagattatttttatctggctgttataaaaacgggattatgaaaacggacgcccagtcgacatcgaacacgcacaacttcatgtattctcccgacaacaatctggaggtggtcatcattaccaattcggacggcgatcacgatggctatttggaactaaccgccgccgccaaaatcatgtcaccttttattagcaacggcggttcgaccgtgtggaccaacgcggcgccatcgcacaaattgattaaaaacaataaaaattatattcatgtgtttggtttatttaaatatctgtcaaattacaatttgaataataaaaaacgtcctaaagaatattacgttcttaaatcgattattagcgacttgcttatgggcgctcaaggcaaagtatttgatccgctttgcgaagtaaaaacgcaactgtgtgcgattcaggagagtctcaacgaggccatttcaactttgaacgttcatgcggccgccaactcgcccgcgccagacattaacaagttgcaagatatgatacaagatttgcagtctgaatacaataaaaaaattacttttaccactgatacaattttggagaatttaaaaaatataaaggatttaatgtgcctgaataaataataataagggttttgtacgatttcgacaatgaacttttgggccacgtttagcatttgtttggtgggttatttggtgtacgcgggacacttgaataacgagctacaagaaataaaatcaatactagtggtcatgtacgaatctatggaaaaacatttttccaatgtggtagacgaaattgattctcttaaaacggacacgtttatgatgttgagcaacttgcaaaataacacgattcgaacgtgggacgcagttgtaaaaaatggcaaaaaaatatccaatctcgacgaaaaaattaacgtgctattaacaaaaaacggggtagttaacaacgtgcttaacgttcaataaacgctacttatcactaagttaatatactaaaaatcatatagtcgctacaatattttgaaatatgaagccgacgaataacgttatgttcgacgacgcgtcggttctttggatcgacacggattacatttatcaaaatttaaaaatgcctttgcaagcgtttcaacaacttttgttcaccatcccatctaaacatagaaaaatgatcaacgatgcgggcggatcgtgtcataacacggtcaaatacatggtggacatttacggagcgtccgttttgattttgcgaacgccttgctcgtttgccgaccagttgctgagcacatttattgcaaacaattatttgtgctacttttaccgtcgtcgccgatcacgatcacgctcgagatcacgttctcctcacggcagacctcgttcgcgatctcggtcccggtctagatcgcggtcacgttcatcgtctcccaggcaaggacggcgacaaatattcgacgcgctggaaaaaattcgtcatcaaaacgacatgttgatgaacaacgtcaaccaaataaatctcaaccaaactaatcaatttttagaattgtccaacgtgatgacgggcgtgcgcaatcaaaacgtgcagctcctcgcggcgttggaaaccgctaaagatgttattttgaccagattaaacacgttgctttccgaaattacagactcgttacccgacttgacgctcatgttagataaattagctgaacaattgttggaagccatcaacacgatgcagcaaacgcagcgcaacgagttgaacaacaccaactctattttgaccaatttagcgtcgagcatcacaaacatcaatggtacgctcaacaatttgctgaccgctatcgaaaacttagcaggcggcggcggcggcggcggcggtggcggcggtggcaattttaacgaagccgacagacaaaaactggacctcgtgcacactttggttaacgatatcaaaaatatactcacgggaacgttgacaacaaaataagcatgtccgacaaaacgccgacaaaaaaaagcggcggccatgccatgacgttacgagagcgcggcgtaacaaaacccccaaaaaagtctgaaaagttgcagcagtacaagaaagctatcgctgccgagcaaacgctgcgcaccacagcagatgtttcttctttgcagaaccacggggagagtgccgtttttcaagagttggaaagattagagaatgtggttgtagtattagaaaatgaacaaaaacgattgtatcccatattaaatacgcctcttgataattttattgttgcattcgtgaatccgacatatcccatggcctattttgtcaataccgattacaaattaaaactagaatgtgccagaatcacaagcgatttactttacaaaaacaaaaacgaagtcgctatcaacaggcctaagatatcgtcttttaaattgcaattgaacgacgtaattttagacactatagaaactattgaatacgatttacaaaataaagttctcacaattactgcacccgttcaagatcaagaactaagaaaatccatcatttattttaatattttaaatagtagtgacagttgggaagtaccaaagtacatgaaaaatttgtttgatgaaatgcaattggaaccccccgccattttaccattaggtctttagatttggtaaagttagcacgtcgacatcatgtttgcgtcgttgacctcagagcaaaagttgttattaaaaaaatataaatttaacaattatgtgaaaacgatcgagttgagtcgagcgcagttgtctcgttggcgttcaaacaaagatattcatccaaaacctttggatcgtgcagagattttacgtgtcgaaaaggccaccaggggacaaagcaaaaatgagctgtggacgctattgcgtttggatcgcagcacagcgtctgcatcgtccaattcgtccggcaacatgttacaacgaccagcgcttttgtttggaaacgcacaagaaagtcacgtcaaagaaaccaacggcatcatgttagaccacatgcgcgaaattataaaaaataaaattacgagcgcggtcgttgaaacggttttggattgcggcatgttctttagctcgttgggtttgcacgccgcttcgcccgatgcgtatttttctctcgccgacggaacgtggattccggtggaaataaaatgtccgtacaattaccgagacacgaccgtggagcagatgcgtgtcgagttggggaacggcaatcgcaagtatcgcgtgaaacacaccgcgctgttggttaacaagaaaggcacgccccagtttgaaatggtcaaaacggatgcgcattacaagcaaatacagcggcagatgtatgtgatgaacgcgcctatgggcttttacgtggtcaaattcaaacaaaatttggtggcggtttctgtgccgcgcgacgaaacgttctgcaacaaagaactgtttacggaaaacaacgcgtacgtggcgtttgccgtggaaaactcaaactgcgagcgctaccaatgcgccgacaagcgacggctttcgttcaaaatgcacagctgcaatcacaactatagtggtcaagaaatcgatgctatggtcgatcgcggaatctatttagattatggacatttaaaatgtgcgtactgtaacgattttagctcaaacagtcgggaagcgtgcgattctgttttaaaacgcgagcataccaactgtaaaagttttaatttgaaacataaaaactttgacaatcctacatactttgattatgttaaaaggttgcaaagtttgctaaagagccaccactttagaaacgacgctaaaacactcgcctattttggttactatttaactcatacaggaaccctgaaaaccttttgctgcggagttcaaaactcgtcgcccaccaaacacgatcatttaaacaattgtgtatattatttggaaataaaatgataaatctttaattatattcttttatttatacattaattttattcacgacaaatattgactcgttgaaacgtgttcgtcaacaactttgttataatttactttcaaaaatttcaaatgttgcaaagcgtccgcgttggtcaatttgttgataataaatttgtctttgcattcaaacgctctgtttgcaatccactccacagcgtccaaaacggacatatttttatatacacgagcggagcggtcacgttctgtaacatgagtgattgtgtgtgttatctctggcagcgcgataatggtcccgaaaattacacgcgcgtcgtaacgtgaacgtttatattataaatattcaacgttgcgggaaaaaaatattaagtgagcatttgagctttaccgaacggttatattataaatattcaacgttgcttgtattaagtgagcatttgagctttaccattgcaaaatgtgtgtaatttttccggtagaaatcgacgtgtcccagacggttattcgagattgtcatgtggacgaacaaaccagagagttggtgtacattaacaagattatgaacacgcaattgacaaaacccgttctcatgatgtttaacatttcgggtcctatacgaagcgttacgcgcaagaacaacgatttgcgcgacagaataaaatcaaaagtcgatgaacaatttgatcaactagaacgcgaatacagcgataaaattgatggatttcacgataacatccagtattttaaagatgaacactattcggtaagttgccaaaatggcagcgtgttgaaaagcaagtttgctaaaattttaaaaagtcatgattataccgataaaaagtctattgaaacttacgaaaaatactgtttgccccaattggtcgacaaacacaacgactgctacgtggcggtatgcgtgttgaagccgggatttgagaacggcagcaaccaagtgctatcttttgagtacaacccgattggtaacaaagttattgtgccgtttgctcacgaaattaacgacacgggactttacgagtacgacgtcttagcttacgtggacagtgtggagtttgatggcaaacaatttgaagagtttgtacaaaaattaatattgccgtcgtcgttcaacgattcggaaaaggttttatattacaacgaagcgtcgaaaaacaaaaacatgatctacaaggctttggagtttactacagaatcgagctgggtcaaatccaacaagtttaattggaaaattttttgtaacggttttatttatgataaaaaatcaaaagcgttgtatgttaaattgcacaatgtaactagtacactcaacaaaaatgtaatattagacatgattaaataaatgttaaaatttattgcctaatattattctttgtcattgcttgattgtgttttacgaatataattctactcgtaacgcaagatttgagatgatgtcatttatgaaatgatgtcatttgtttttcaaattgaactggctttacgagtagaattctacttgtaacgcacgatcaggtatgaatcataagctgatgtcatggtttgcacacggctcataaccgaattcgttttacgagtagaattctacttgtaacgcacaatcaagaaatgatgtcatttgttttgcaatatgatatcatacaatatgactcatttgtttttcaaaatcgaacttgatttacgggcagaattctacttgtaaagcacaatcaaaaaaatgatgtcatttgtttttcaaaactgaactggctttacgagtagaattctacgtgtaaaacatgatcaagaaatgatgtcatgaggtgatgtcatttgtttttcgaaactgaactggctttacgagtagaattctacgtgtaaaacgcgatcaagaaatgatgtcatttgtttttcaaaactgaatttaagaaatgatgtcatttgtttttcaaaactgaactggctttacgagtagaattctacgtgtaaaacacaatcgaaaggtgatgtcatttgtagaatgatgtcacttgtttttcaaaactgaactggctttacgagtagaattctacgtgtaaaacacaatcaaaatatgatgtcatttgttataaaaataaaattgatgtcatgttttgcacacggctcataaccaactcgctttacgagtaaaattctacgcgtaaaacccgattgataattaaataatttatttgcaagctatacgttgaatcgaacggacgttatggaattgtataatattaaatatgcaatcgatccaacaaataaaattgtaatagagcaagtcgacaatgtggacgcatttgtgcatatcctagaaccgggtcaagaagtgttcgacgaaacgctaagccggtaccaccaatttcctggcgtcgttagttcgattattttcacgcaactcgtgttaaacacaataattagcgttttgagcgaagacggcagtttgctgccgttgaaactcgaaaacacttgttttaatttccacgtgtgcaataaacgctttgtgtttggcaatttgccagcggcaatcgtgaataatgaaacaaagcaaaaactgcgcattggatctccaatttttgccggcgaaaagctagtttcggttgtgacgacgtttcatcgtgttggcgaaaacgaatggctgctaccggtgacgggaattcaagaagcgtctcggctgtcgggacacataaaggtgccgaacggcgtccgtgttgaaaaattgcgacccaacatgtctgtttacgggactgtgcaattgccgtacgataaaattaaacggcatgcgctcgagcaagaaaataaaacgccaaacgcgttggagtcttgtgtgctattttacagagattcagaaatacgcatcacttacaacaggggggactatgaaattatgcatttgaggatgccgggacctttaattcaacccaacacaatatattacagctaaataagaattattattaaattatttgtatattaattaaaatcttatactgtaaattacattttatttactatcatgtcaaagcctaacgttttgacacgaattttagacgccattgcggaaactaacacaaaggttgacagtgttcaaactcagttaaacgggctggaagaatcgttccagcctttggacggtttgcccgctcaattgaccgattttaacactaaaatctcagaaattcaatccatattgaccggtgacactgctccggatcctccagactcctaaagcctacgctgaaaatccaagcttttgaattcgattcagacgctcgtcgtggtaaacgcagttccaagtaaataaatcgtttttttttaaaataacaaatcaattgttttataatatccgtacgattctttgactatgtaataaaatgtaatcattaggaagattacgaaaaatataaaaaatatgagttgtttgtgtataacaaatgctgtaaacgccacaattgtgtttgttgcaaacaaacccattattatttgattaaaattgttgttttttttgttcatagacaatattgtgttttgcctaaacgtgtactgcataaactccatgcgagtgtatagcgagctagtggctaacgctttccccaccaaagtagattcgtcaaaatcctcaattttatcaccctcatccaattttaacatttggccgtcggaattaacttctaaagatgtgacataatttaataaatgaaatagagattcaaacgtagctttatcgtccgtttcgaccatatccgaaaagaattcgggcataaactctatgatttctctagacgtggtgttgtctaaactttcaaagtatgcagtcaggaacgtgcgcgacatgtcgtcgggaaactcgcgcggaaacatgttgttgtaaccgaacgggtcccatagcgccaaaaccaaatctgccagcgtcaataaaatgagcacaatgccgatgacggagctggctttgatagcaattcgagttaacgctttggcagtcgtggtcagcgttttgatggcaatcgcgttgaacgagtgcactatcgcggctttgtaagtctctcccaagatgcgcgcggtcacgcgccgagtcgtgctaaccaacatgcgtttcaaggccggaatgagagtagtgttaatttttttcaacatgcttttaaacccggacattagcatctcaaagccagcgtccgtagcaataccgaaaatgatcgcgtaatcttccaaaaactttgttataattgactccaaatcttggtcgctgattgaacggtcgagcgcctcaaaatgttcgacatgtacacgttcggtaccgcggtaattgtatgtgatcggagttttagtaaagccggtttcggccgtgtacgtgatctggacgggcgacccgtcgacaatcatgcccaaatcgtttagtgttggccttttggtaaaaagtttttcaaattccaagtctgtagtggtatcgcgcacgctgcgccattgcgctaatattgcgttggagtccacgttgggtcgtggcggtagtatgctggaaggcgctctgtaatcaaaattgcgcaattcgctaaaaacgttgttggccagcattttgaaagtgacaagaatcgtgtcgcccagcacgaatccgacgagcgattcccaccatctaaacgaacagccgccgttgaatagatttctgccgaatcgtcgacagtaggcttcgttgaattcgcctttaaagcgttcgggaaacaagggatcgggatcgggccgaacgttaaaagccggcacatcgtccacgcccatgatcgtgtgttcttcggtgcgcaagtatgggctgttaaagtacattttggacagcgagtccaccaagatgcatctgttgtcgggcgtgtatctaaactcggcagactgaactttattttcggcgccttcacgcatggccgccgccctgtccaaatggtagcacgctggctgcgcgtaacccactctagtctctgaggtctgcgtgtacatgaacggtgtcgtgttggacacgactccggtttcgtgaaacggatagcagctcatgctttcgcacccgcgcttgctgaaagtcagtttgacggccagcgctctgtcggccaatttcggcggcacataataatcgtcgtcacttgacgcgggacgcaacgtgtagtcgatcagtatatgcggaaacctagtgcgccatctcgaaataaactcgagacgatgcatatgtatggcatatctactggcattagttaaatcgacggctgttaagaccgccatgttatatatgacttaaattaaacaacgataataatgaaatatttattagattatactataacaatacatttgcatttattatgattatattatatttgcatttattataacaattacatatgagcaaccccgtcgtcaggacgggtctacctctaacagcgtcgtaaaaagatagccgcatacagtgcttattaccaaatcaggcctgattcaataacgatacattttatttagacattgttgtttacaatattaattaactttttatacatttttaaatcataatatataatcatttcgttgtgcatttcaaagtttttgatcgctttagaatagtacacaagtttagagtattcaggaaaatgataaacgttggtaaacccgcatttggtacaatataacacgggatttttataatacagtttagtttttttacacaatttgcaataattgttaattgtaggtctcgaaggaaacgtgattgcgccgccgtccaatacctcggtaaattttttgactttaacagtggcaaacacggttcctttgatacccgaaaatcggttgtcttgcagagcggccatcatttcgcttggctcttgaagtataaaacaattaacgtcgtccgccgcgtcgggtctggtgcacatgcttcggtagcgctgcaacactatattggtgtacgtttctctgagaacgagaccgccggtggtgctaagatcgatcgtttgaatgcgctcgttgggctctttgtgatttcgaattatgcgcctaattatttcaaacactttgcaattgtgatcgtcaattttcaattctttaacttccgtcgtgtgctccaaacttacagggaaaatgtattggtaaaaaaacctctctctggctaaatagctgaggtcgaccaaattgatagaaggatatatttcgtacgaggtctttggaacgttgtgatatagatagcatttttgacagcatatgtctatgcggtcagaatcgtccaacggcttttcgatgtgaaccacaacatacaaaaaccatgcgcgcgtgttgtctttgaatctataattgcaagtggtgcatcgcgaatcgctcatgtgctgctccgtagtctttttgtattttacagaactgcttgcaaatttgcccgtcatgcgcatatctttactgtttatataacccataatgtaattggtggaaaattttagcgtggctttcatgatgttgcgttctaaatcgctcataaaatgcatacgtagatcacgctcttgtttgaaatccagtttgtcgctgtacgcgggcaaactttccaatttgttaccaaactcgggcggcacaaaatatccatcttttctgttgacgactggttttttacttacaatgctgctgctgatgctgcgctccaacggattggccgaaaaagtgcgcgtaggcaaagagatgcgcgtaggtggtttgatgttagattttggcggctgacgaacaggcgacagcggcgagttggcgacaggcgttggcaaagatttgacacggcccttgccaccggtctttggcgcgtcaaaaatgttattctctcgaaaaaaacggttcattgtaactgttggttagcactcaaaaatcaacacaatactgtgcacgttcagccatcgagaggctttatatacgaaaaccttatctatagaaataaaattgtatatgcgtaggagagcctggtcacaaggcactttgcgcgcgacactagggctgtggaggggacaggctatataaagcccgtttgtccaactcgtaaatcagtatcgattgtgtcacggcgcacacgcttgcttgcgcgctggatagtataagtgattgataacgagcaacgcaacatgataagaaccagcagtcacgtgctgaacgtccaggaaaatataatgacgtcaaactgtgcgtcatcgccatattcgtgcgaggcaacgtccgcttgcgcagaagctcagcaggtaatgattgataactttgttttctttcacatgtacaccgccgacatacaaatcgacgcaaaggtgcaatgcggcgtgcgttcggccgcgtttgcaataattgacgataaacatttggaaatgtacaagtatagaatagagaataaatttttttattactatgatcaatgtgccgacattgccaaacccgaccgtcttcccgatgacgacggtgcgtgctgtcaccattttattttcgatgcccaacgtattattcaatgtattaaagaaattgaaggcgcgtacggcgtgcgtgatcgcggcaatgtaatagtgttttatccgtacttgaaacagttgcgagacgcgttgaagctaatcaaaaactcttttgcgtgttgttttaaaaatataaattctatgcaaatgtacgtgaacgagttaatatcaaattgcctgttgtttattgaaaagctggaaactattaataaaactgttaaagttatgaatttgttcgtagacaattcggttttgtacgaatgcaatgtttgtaaagaaatatctacggatgaaagatttttaaagccaaaagaatgttgcgaatacgctatatgcaacgcgtgctgcgttaccatgtggaaaacggccaccacgcacgcaaagtgtccagcgtgcaggacatcgtataaataagcacgcaacgcaaaatgagtggcggcggcaacttgttgactctggaaagagatcattttaaatatttatttttgaccagctattttgatttaaaagataatgaacatgttccttcagagccgatggcatttattcgcaactatttgaattgcacgtttgatttgctagacgatgccgtgctcatgaactatttcaattacttgcaaagcatgcagttgaaacatttggtgggcagcacgtcgacaaacattttcaagtttgtaaagccacaatttcgatttgtgtgcaatcgcacaactgtggacattttagaatttgacacgcgcatgtacataaagcccggcacgcacgtgtacgccacgaacctgtttacgtccaatcctcgtaaaatgatggctttcctgtacgctgaatttggcaaggtgtttaagaataaaatattcgtaaacattaacaactacggctgcgtgttagcgggcagtgccggttttttgttcgacgacgcgtacgtggattggaatggtgtgcgaatgtgtgcggcgccgcgattagataacaacatgcatccgttccgattgtatctactgggcgaggacatggctaagcactttgtcgataataatatactaccgccgcacccttctaacgcaaagactcgcaaaatcaacaattcaatgtttatgctaaaaaacttttacaaaggtctgccgctgtttaaattaaagtacacggtggtgaacagcactaaaatcgtgacccgaaaacccaacgatatatttaatgagatagataaagaattgaatggcaactgtccgtttatcaagtttattcagcgcgactacatattcgacgctcagtttccgccagatttgcttgatctgctaaacgaatacatgaccaaaagctcgatcatgaaaataattaccaagtttgtgattgaagaaaaccccgctatgaacggtgaaatgtctcgcgagattattcttgatcgctactcggtagacaattatcgcaagctgtacataaaaatggaaataaccaaccagtttcctgtcatgtatgatcatgaatcgtcgtacatttttgtgagcaaagacattttgcaattgaaaggcactatgaacgcgttctacgcgcccaagcagcgtatattaagtattttggctataaatcgtttgtttggcgccacggaaactatcgactttcatcccaacctgctcgtgtaccggcagagttcgccgccggtccgtttgacgggcgacgtgtatgttgttgataagaacgaaaaagtttttttagtcaaacacgtgttctcaaacacggtgcctgcatatcttttaataagaggtgattacgaaagttcgtctgagttgaaatcccttcgcgatttaaatccgtgggttcagaacacgcttctcaaattattgatccccgactcggtataataataatatgatttacacagatcccactactggcgctacgactagcacagatgtgcagtccgcaaactatttaaacaggctaactccaaacatgtttttgaccattttggctgtagtagtaattattgctttaataattatgtttgttcaatctaacagtaataatggaaacagctcgggtgctggctctggtggtaatggtggcggtggtggtgctgctacacctccaagcgcgacaggttttatgaatcctttaaacgctaccatgcgagctaatccctttatgaacacgcctcaaaggcaaatgttgtagataagtgtataaaaatgaaacgtgtcaaatgcaacaaagttcgaacggtcaccgaaattgtaaacagcgatgaaaagatccaaaaaacctacgaattggccgaatttgatttaaaaaatctaagcagtttagaaagctatgaaactctgaaaattaaattggcgctcagcaaatacatggctatgctcagcaccctggaaatgacccagccgctgttggaaatatttagaaacaaagcagacactcggcaaattgccgccgtggtgtttagcacattagcttttatacacaatagattccatccacttgttactaattttactaacaaaatggagtttgtggtcactgaaactaatgacacaagcattcccggagaacccattttgtttacagaaaacgagggggtgctgttgtgctccgtcgacagaccgtctatcgttaaaatgctaagccgcgagtttgacaccgaggctttagtaaactttgaaaacgataactgcaacgtgcggatagccaagacgtttggcgcctctaagcgcaaaaacacgacgcgcagcgatgattacgagtcaaataaacaaccagattacgatatggatttgagcgattttagcataactgaggttgaagccactcaatatctaactctgttgctgatcgtcgaacatgcctatttgcattattatatttttaaaaattacggggtgtttgaatattgcaagtcgctaacggaccattcgctttttaccaacaaattgcgatcgacaatgagcacaaaaacgtctaatttactgttaagcaaattcaaatttaccattgaagattttgacaaaataaattcaaattctgtaacatcaggctttaatatatataattttaataaataattaaataatatacaatgctgttattaattatatttttaatattaattaaagtattaatatttaaaaaaatgaatcaaactcatctaaagtgtcacagcgataaaatttgtcctaaagggtattttggcctcaacgccgacccctatgattgcactgcgtattacatctgtccgcataaagtgcaaatgttttgtgaatcaaatcacgaattcgacttggactcggccagctgcaagcctatcgtgtacgatcgcacgggcagcgggtgtgcggctcgcatgtatagaaacttgttattatgaagagtggctttctagttgcacaacactattatcgatttgcagttcgggacataaatgtttaaatatatcaatgtctttgtgatgcgcgcgacatttttgtaagttattaataaaatgcactgacacgttgcccgacattatcattaaatccttggcgtagaatttgtcgggtccgttgtccgtgtgcgctagcatgcccgtaacggaccttgtgcttttggcttcaaaggttttgcgcacagacaaaatgtgccacacttgcagctctgcttgtgtgcgcgttaccacaaatcccaacggcgcagtgtacttgttgtatgtaaataaatctcgataaaggcgcggcgcgcgaatgcagctgatcacgtacgctcctcgtgtcccgttcaaggacggtgttatcgacctcagattaatatttatcggccgactgttttcgtatccgctcaccaaacgtgtttttgcattaacattgtatgtcggcggatgttctgtatctaatttgaataaataaatgataaccgcattggttttagagggcataataaaaaaaatattattatcgtgttcgccattagggcagtataaattgacgttcatgttgaatattgtttcagttgcaagttgacattggcggcgacacgatcgtgaacaaccaaacgactatgacgcaaattaattttaacgcgtcgtacaccagtgctccgacgccgtcccgagcgtcgttcgacaacggctattcagagttttgtgataaacaacagcccaacgactatttgaattattataacaatcccacgccggatggagccgacacggtagtatctgacagcgagactgcagcagcttcaaactttttggcaagcgtcaattcgttaactgatgataacgatataatggaatgtttgctcaagaccactgataatctcggagaagcagttagttctgcttattattcggaatcccttgagctgcctgttgcggagcaaccatcgcccagttctgcttataatgcggaatcttttgagcagtctgttggtgtgaaccaaccatcggcagctggaactaaacggaagctggacgaatacttggacgattcacaaagtgtggtgggccaatttaacaagaataaattgaagcctaaatacaagaaaagcacaattcaaagctgtgcaacccttgagcagacaattaatcacaacacgaacatttgcacggtcgcttcaactcaagaaattacgcattattttactaatgattttgcgccgtatttgatgcgtttcgacgacaacgactacaattccaacaggttctccgaccatatgtccgagactggttattacatgtttgtggttaaaaaaagtgaagtaaagccgtttgaaattatatttgccaagtacgtgagcaatgtggtgtacgaatatacaaacaactattacatggtagataatcgtgtgtttgtggtaacgtttgataaaattagatttatgatttcgtacaatttggttaaagaaaccggcatagaaattcctcattctcaagatgtgtgcaacgacgagacggctgcacaaaattgtaaaaaatgccattttgtcgatgtgcatcacacgtttaaagctgctctgacttcatattttaatttagatatgtattacgcgcaaaccacatttgtgactttgttacaatcgttgggcgaaagaaagtgtgggtttcttttgggcaagttgtacgaaatgtatcaagataaaaatttatttactttgcctattatgcttagtcgtaaagagagtaatgaaattgagactgcatctaataatttttttgtatcgccgtatgtgagtcaaatattaaagtattcggaaagtgtaaagtttcccgacaatcccccaaacaaatatgtggtggacaatttaaatttaattgttaacaaaaaaagtacgctcacgtacaaatacagtagtgtcgctaatcttttgtttaataattataaatatcatgacaatattgcgagtaataataacgcggaaaatttaaaaaaggttaagaaggaggacggcagcatgcacattgtcgaacagtatttgactcagaatgtggataatgtaaaaggtcacaattttatagtattgtctttcaaaaacgaagagcggttgactatagctaagaaaaacgaagagttttattggatttctggcgagattaaagatgtagacgctagtcaagtaattcaaaaatataatagatttaagcatcacatgtttgtaatcagtaaagtgaaccgaagagagagcactacattgcacaataatttgttaaaattgttagctttaatattacagggtctggttccgttgtccgacgctataacgtttgcggaacaaaaactaaattgtaaatataaaaaaattgaatttaattaattatacatatattttgaatttaattaattatacatatcttttgaatttaattaattatacatatattttatattatttttgtcttttattatcgacgaggggccgttgttgatgcggggtgttgcataataacaatgggagttggtgcgccaccgcttcctcctcctcctcctcctccttttgtcatgtatctgtagataaaataaagtattaaacctaaaaacaagaccgcgcctatcatcataatgatgggcattattttgttgcggatgccgtcactactgttggacgatttgccgactaaaccttctcttcccagtaaccaatctaaacccaagtcgccaactaaatcactaaacgagtaaggttcgatgcacatgattgtttggcccgcaggaagatcgctgatatctacgtattgaggcgaatttgggttagcggccggattgctgccgcgacaaactgttttttctgtttcatagttaaatccttggcacatgttggttagtaggggcgaatcgttagccaacaaggggtctcttgagcaaatgttaacatccgactgagctagattgcggtcttgacgacaagtgcgctgcaataacaaacaggactcgacgttttctccggcgtttctaccttgcacataataacttccgccggttctattgatggcgttgattatatcttgtactaatgtggaggcggtaaacaaaagataaccgccgccggccaagagtatgcccactcctgctactttcaaggttctcatgtgattatgtaaacgggggttttgctgcagtgcgttttgaacaccttcgggcgtgcgcacgttggtctctgggaagttttgtctgactgcattggatcgcgtctgtttggtgtggtaatgaaagtctggcacgttgtccatgcgccgcaattggcgcaatgagtttatttgagggtctgaaatgccctgaaatacattgcgtatgttggggacatcgttgttacgagtgattctgtttatgtctgaagtgctcacaaaccggttgttagataattgatagcccggctgatatctgttgtttccaaggttgcgtacactgggcgcgttgagcacatttgtgaaaccggcgggagtgcttgttaaaagacgcgtattatcagcaagaaaactggcctgattaggatacaatttattgactctacgaagatttgtaaaaaaactcattttaaagcaaacttatttaataaatatatcacagtaaaggttttgcaaaattgccgtcgtcaatacaacacggctgcggcgccatgttggtaaaatctaatcttctccttgctttagattttgggcgagagggcgcatttgttgtgtcagtcatttcgacgtctgcattatttgttgtgtaaggtacttcaatgtatgaagcgactttaacattattataattttttttaaatattgatgcgttccacggcgctcgttgatacggatgatatctctccattgtatgatcgctaaagttatataccgtttcaataaatatgttcaaacccaacatgattagaatatacataatagtttatttgttttttataattatttttattgttttgaaatctaaaagaggtaacgataacgataacgataacgataacgataacgataacgattcagacgacgagttcagttgcgttaacagaccaattggagtacattttccgcatcctactaaatgtaatgctttttacatgtgtgtcggtataaatcatagattagagttactttgttctgaaggatttgaatttgatccaaatgttaaagattgtgttcctatatcagattatggatgtactgctaaccaaaacaaaaataaaaataaaatttattaaatatattttattatttatattatttacaacacttaaggtttagacatctcaatagtgtataactcagcaactaattcagaattacgacgctcaaactgtgaaaatttggcttgagactcggccacctgcttacgcaattgttcttgcagatcattcacagtcgattgcaactcttgtgttttcttggtaaattcttccaaatcacgatttgcccattttaattttaattcggtaattttatgttcgtgtttaagcatagcgtagtcgcagtttaacatagtcattttatgttcaacttggctgttcttggctcgcagctcggaccgttctctttccaatcgctccacatcgtttaagtctataatgcgattgttgaccgtgttattttctaaaagctcacgccaatgctgtttgatggaatcccggttacgaatgagggttaagggcataaattctacatacccgtgcttattgtacacgcgaaaatctgatgaactagcgctgcaaaaacatttgtacgtagaattgtccataattatcctgacataacatttgaaacacacagcatggttacaatcaatcgaagtcacaaacgaagaatctacgtttttagtgtcttttaaagtagtaaaacaaatattacacgaaacctctacttcttcgccttcttcttcttcttcttcctcgtcttcatcttcgagttctaattcatgctgctgcggagactgcggcgagtcaaacaaatctggcgactgtgataatacgtcattcgacggataaggtggactataagcgggagaccttggggaaatttcactcatcagttgtgactcaagatctaaacctcgctgcagagccctctgcgcagctgtctccgacgcaatgctattctggtactgctgagaagcacgatccacactttcaatggtgtcatcttcttgacttaacaacggatcgtcattgctaatgttaacctgaccgtgcacgtgatacgtgacaccctgactatggtacgtgcgcgtcaacggctcgttggcgtttccgataatctgcacgttgtcttcgctgacacgctgctcctgactccgctcctgacggcgacgtctgcgactgcttgaatacggttggctgcgactgcttgaatacggttggctgcgactgcttgaagacggttggctgcgactgcttgaagacggcagggcttcgggagatgttgtaaagttaatgcgacgacggctgagagacagcctgtggcggcggctgctgctgctgggagtgacggcgttgatttggcgactcatggctggctggtagcgatactgttcgttaggctgtgaggcttgaactgtgcttacgagtagaacgatcactgtatttatactgtttatcagtagtgtacgactgataagacaatagtgataagggaacttgtcaggcaaaaatgaacttttttgtaatgcaaaaaagttgatagtgtagtagtatattgagagcgtatagtacagtgtagactattctaataaaatagtctacgatttgtagagttcgtactgtatattatatgtcaaacataggcgaacttttttgtattgcaaaaaaattcattttttaatttatcatatcacaggcttcagtactgttatctgtccccactcaggcgtacagctataacatatcacaggcttcagtttctgttatctgtccccactcaggcgtacagctataaaagcagacacttgtcaactcgtaagcacagtttgttgcggagagcctgccaataagcaaaatgccaagggacaccaacaatcgccgccgccaccggtctacgccatatgaacgtcctacgcttgaagatctccacagacagttggaagacgctttggagaggcgctatcaaatgcgtagaaggcagcgtcaaaaccggctccgcaccatacaaataaaacagcagcgaatgatggcggaattaaagaaagagccggtaattaattttaaatttgagtgcagtgtgtgtttcgaaacatattctcaacaatctaacgatacttgtccttttttgattccgactacgtgcgaccacggtttttgtttcaaatgcgtcatcgatctgcaaagcaacgcgatgaatattccacattcaattgtgtgctgtccattgtgcaatacccaggtaaaaatgtggcgttctttaaaacctaacgctgttgtgacgtgtaagttttacaagaaaactcaagaaagagttccggccgtgcagcaatataaaaacattatcaaagtgctacaagaacggagcgtgattagtgtcgaaaacagcgacaacaattgtgacataaatatggagaatcaggcaaaaatagttgctttggaagctgaattaaagaacgaaaaaaatcacagtgatcaagtaacttctgaaaaccgacagctaatagaggaaaatactcgtctcaacgaacaggttcaagaattgcagcgtcaggtgaggacattggcgccgcaacgtggcattacggttaatccgcaaataggccgtgacgaccgtgcgccagccgagctgaacgagcgttttcgctcactcgtctattcgactatttcagaactgtttattgaaaatcgcgttcatagtattcaaaattatgtttatgccggaacttctggtgctgctagttcatgtgatgtaaatgttactgttaattttgggtttgaaaattaatgtgatatgtatgtataaatgtatatataaaaatgctgaaacaactaataaacgttttttatttgttttttttattttatgtgattaagaaacttttaacatggatagtagtaattgtattaaaatagatgtaaaataccatatgccgttacattatcaatgtgacattaacgcagataaaaacgttgtaaatgcgtatgacgctatcgatgttgaccccaacaaaaaatttataattaatcataatcacgaacaagtcgatgaaacaaacaaacaagaagtcgtcgataaaactgacgcaacaacatacaattcttgcatcataaaaatttaaatgatattataatttaaaataacaatgacatcatcgtttgattgtgttttacacgtagaattctactcgtaaagccagttcagttttgaaaaacaaatgacatcacctcttgattatgttttacacgtagaattctactcgtaaagccagttcagttttgaaaaacaaatgacgtcatttcttgatcatgttttacacgtagaattctactcgtaaagcgagttcagttttgaaaaaacaaatgacatcaatttttatttttataataaatgacatcatttcttgatcatgttttacacgtagaattctactcgtaaagcgggttcagttttgaaaaacaagtgacatcatttcttaaattaagttttgaaaaacaaatgacatcacctttcgatcatgttttacacgtagaattctactcgtaaagcgagttcagttttgaaaaacaagtgacatcatttcttaaattaagttttgaaaaacaaatgacgtcatttcttgatcatgttttacacgtagaattctactcgtaaagcgagttcagttttgaaaaacaaatgacatcatttttttgattatgttttacaagtagaattctactcgtaaaacgagttcggttatgagccgtgtgcaaaaaatgacatcagcttatgacatcacccactgatcgtgcgttacaagtataattctactcgtaaagcgagtacatatttagttacgtttctgagataagattgaaagcacgtgtaaaatgtttcccgcgcgttggcacaactatttacagtgcggccaagttataaaagattctaatctaatatgttttaaaacacctttgcaacccgagttgtttgcgtacgtgactagcgaagaagatgtgtggaccacagaacagatagtaaaacaaaaccccagtattggagcaataatcgatttaaccaacacgtctaaatattatgatggtgtgcactttttgcgggcgggcctgttatacaaaaaaattcaagtacctggccagactttgccgtctgaaagcatcgttcaagaatttattgacacggtagaagaatttacagaaaagtgtcccggcatgttggtgggcgtgcattgcacacacggcattaatcgcaccggttacatggtgtgcagatatttaatgcacaccctgggtattgcgccgcaggaagccataaatagatttgaaaaagccagaggtcacaaaattgaaagacaaaattacgttcaagatttattaatttaattaatattatttgcattttttaacaaatactttattctattttcaaattgttgcgcttcttctagcgaatcaaaactaatgcttcgcttgctacgtttactttgtagccgatcagtggcgttgttccaatcgacggtaggattaggccggatattctccaccacaatgttggcagcgtcgatgttacgtttgtgcttttggctttccacgtacgtcttttggccggtaatagccgtaaacgtagtgccgtcgcgcgtcacgcacagcaccggatgtttgcgcttgtccgcggggtattgaaccgcgcgatccgacaaatctatcattttggcaattaaattggagacctgcgtgtctttaacctgcaacaactcgtcttttttgtgcatcatttcatcttttctctgcatagtttcctgaaacccggtgtacatgcggttgaggtcggtcatcacgcgcgtcacttgcaagtctttggcctcaatctgcttgtccttaattgcgatgatgcgttcgataaactcttgctttttaaaaagttcctcggttttttgcgccaccaccgcttgcagcgcgtttgtgtgctcggtaaatgtcgcaatcagtttagtcaccaactgtttgttcttttcctcctgttgtttaattgcggggtcgtacttgcccgtgcatagcacttgaggaattacttcttctaaaagccattcttgtaattctatggcgtacggaagcttgctcttcataatcaattgaatcacgcccgatttagtaataagcactgtatgcggctgcaaatacagcggatcgccttgctttgccacgctgtttggagccgagggcggtagtctcgcccccgactcgctgtacgtatatttgtattttttatccacgtgtctgcttacagcgtctttacaatttccatattttaaactgctggcgatgtccttggccacaaacttgacttgcgggtttccttgctcgagcacgtacctcagcgtaaacgtgtcctggccgaatttgaactgcccgattttaacttgagccattttaatttattaaattaaatttatttacaacgacgcgtgacgattcgacgaaagcgcgaaacaaactgaacggattagttttgcgagcagtggggcaagcacgtctcgagcgcgcgcttgatgtgctcgaaatccgtgcagtagacctcgccgctgttgcggtacggtctcaactcttgtttcatcagcttttcgagcagcgtgtggtgcacggtgggctcggtctgcagcacgtaccgcatctggtcgtcgtcggcgcggccgcaattcagagaaaccagtcgccgcgtcaagtttgtagtctggccgatcttgaacagattcctttcggcgtacagcagcgtcgtggccgcatagaaatggccctcgacgggagcggaattaaactttactgtcgcttgggcgtcttggagcaggctcaacgccgactgtcgggcggtgcactggggcaacacgtgttcgtaaaaccaattttgcagctccgccgcgttggtcatcttggagcgcatgaacaactgtataacgcctattttgtcgagtaatattgtttgcgtctgcaaatacagcggattgccttgtttaacgtgtttttctttgctgatattaatacacgcttgctcgaatgtgcatttgtacttgccgtcgacgtgatctctaattgcttttttggtgtttttaaattttaatttgtttgcaatgtccctggccacaaatctgaccggctgctcgccgccgagcacgtacctcagcgtgaacgtgtcttcaccgaatttgaacttgccaattttaacttgagccattttttatttacaaactacgcgtagagattcgacgaaagcgcaaaacaaactgagaacaactagtagtggtgttgctacaaattccctccggcgttgatgcgctgcacttcaaatagttcgttgacgccctcctccgtttcgccaaacacgtccaacgggtggtcgataaccagcagcgtgccgcacgcaacgcacaagtatctgtacaccgaatgatcgtcgggcgaaggcacgtcggcctccaagtggcaatattggcaaattcgaaaatatatacaattgggttgtttgcgcatatctatcgtggcgttgggcatgtacgtctgaacgttgatttgcatgcaagccgaaattaaatcattgcgattaatgcgattaaaacgttgtacatcctcgtttttaatcatgccgtcgattagatcgcgcaatcgagtcaagtggtcaaagtgtggaataatgttttctttgtattcccgagtcaagcgcagcgcatattttaacaaactaaccatcttgtaagttagtttcatttaatgcaactttatccaataatatattatgtatagcacgtcaaaaattaacaatgcgcgcgttgtcgcatctcaacacgactatgatagagatcaaataaaacgcgaactaaatagcttgcgacgtaacgtgcacgatatgtgcacgcgttcaggcacgagttttgattgtaacaagtttctacgcagcgatgacatgacccccgtagtgacaacgatcacgcccaaaagaactgccgactacaaaattaccgagtacgtcagtgacgttaaaactattaagccatccaatcgaccgttagtcgaatcgggaccgctggtgcaagaagccgcgaaatatggcagatgcaccgtataacgtgtggagtcctctcattagcgcgtcatgtttagacaagaaagctacatatttaattgatcccgatgattttattgataaattgaccctaactccatacacggtattctacaatggcggggttttggttaaaatttccggactgcgattgtacatgctgttaacggctccgcccactattaatgcaattaaaaattccaattttaaaaaacgcagcaaaagaaacatttgtatgaaagaatgcgtagaaggaaaaaataatgtcgtcgacatgctgaacagcaagatcaatatgcctccgtgcatacaaaaaatattgggcgatttgaaaaaaaacaatgtaccgcgcggcggtatgtacaggaagaggtttatactaaactgttacattgcaaacgtggtttcgtgtaccaaatgtgaaaaccgatgtttgatcaaggctctgacacatttttacaattacgactccaagtgtgtgggtgaagtcatgcatcttttaatcaaatcccaagatgtgtataaaccaccaaactgccaaaaaatgaaaactgtcgacaagctctgtccgtttgctggcaactgcaagggcctcaatcctatttgtaattattgaacaataaaacaattataaatgtcaaatttgttttttattaacgatacaaatggaaataataaccatctcgcaaataaataagtattttactgttttcgtaacagttttgtaataaaaaaacctataaat

SEQ ID NO: 5 - DNA, 111953 bp, Maruca vitrata multiple nucleopolyhedrovirus
atgccggattattcataccgtcccaccgtcgggcgtacctacgtgtacgacaataaatattacaaaaatttgggttctgttatcaaaaacgccaagcgcaagaagcatcttgtcgaacatgaggaagaggaaaagcactgggatcccctggataattacatggtcgccgaagatccctttttaggaccgggaaaaaaccaaaaattgactctttttaaagaaattcgcattgtgaaacccgatactatgaagctgattgtcaactggagcggcaaagagtttctgcgtgaaacttggacccgttttgttgaggacagcttccccattgtaaacgaccaagaggtgatggacgtgttcctcgttgtcaacctaagacccacacgacccaacagatgctataaattcctcgctcagcacgctcttcgatgggattgcgattacgtgccccacgaagtgatcagaatcgtggagccttcttacgtgggcatgaacaacgagtacagaattagtcttgccaaaaagggcggcggttgcccaattatgaacatccacagcgagtacaccaactcgtttgaaacgtttgttaaccgcgtaatatgggaaaacttttacaaacccatcgtttacatcggcacggactctggtgaagaagaggaaatcctaattgaggtttctcttgttttcaaagtaaaggagtttgctccagacgcgcctcttttcactggtccggcatattaagcgctagattgtgtacgttgttgatttatagacaattgttgtacatattttaatagttcattaaatttataatctttagggtggtatgttagagcgaaaatcaaatgattttcagcatctttatatctgaatttaaatattaaatcctcaatggatttgtaaaataggtttcgatcagtttcaaacaaaggttgcttctccgaatcggtgactggattatctaacggattttcgctcaacgacacaatgcttgccaaatcttgtagcagtaatctggctttgtcgatattcatttgtgttttgtcttgtaataaagcttcgacgtcgttcaaaacgttatgcgcttttgtatttctttcatcgtaatcgtttgtgtatagttgactcgacgtaaatacgttaaacagcgtctggatatatttaatgtcgggcgagtaagctttattggaccgcccatcgtcccaatcctcgtcattggaagttgcttccgaagacgattttgccatagccacacgacgcctattaattgtgtcggctaacacgttagcaatcaaatttgtagtcgagctttttggaattacgtccgactgcggacgtttttgagagggttttaatctaactgttcccgattttaattctgacaacacgtcagaaatcgatggcgcaggttgcggtaacggttgagctggcggtagttgagccggtggtggtgccgatgataaatctatcataggtggaggcgccggcggagttaggcctggcggtggaggcggaggcggtggcggaggcggcgtaaagaggggcttaggttcaaacaaatctttggtcaagttagccgtcaattcgggtactgtgcctggtaccgtttttgatttgatcggtttgagacgagtgcgatttttttcgtttctaatagcttctaacaattcttgtcggatgtctaaagtcggtttaggttcggtggtcgacattggtggagctggtggcaattcagacatagaaagtggcggctgcaatggaggcggcggcggcggtggtggaggaggaggcgctggaatgttagacattgaaggcagcggcggcggcggtatcgccgctggttctgccaccgcaggcgccgctggctgcaacacaacggaaggtcgtctgcttcgaggcagcgcttggggcggtggcggtggtggcggagtttcgatattataattggaatacaaatcgtaaaaatctgctataagcattgcaatttcattatcgtttacagtgccgacatttaacaatcgttcaatgtaagcaatagtatcataaagggattgtctcaagcttgcatctcgcacgccgataacaagccttttcatttttatcacagtattgtagtggcgagacactttactgtcgtcgatatacatgtacgctttgttttcaaaaacgtcgttggctaactttaaaatattcaaaagaacatctctattgagcaatattgttttgtcgtagatgctgtttttgataatttgtgcttccgcagtatcgacacattcaaaaaattgacccgcatcaattttgttgtttctgttattaaataaataagattgtacggattcatatctacgatttgccatgaccgtcaacgcgtttcaaacgttggcacaattttacgaaaactgcaaaaatgttgaaactcgctataaaataatcaatggtcgttttggcaagatatctattttatcgcacaagcccactagcaaattgtatttgcagaaaacaatttcggcacacaactttaatgccgacgaaataaaagttcatcagttaatgggcgaccatccaaattttatccaaatctattttaattacggatccatcaacagccaagtgattgtgatggactacatagactgtcccgatttgtttgaaacgctacacataaaaggaaaactttctcatcaactcgttagcaatataattagacaactgtgtgaagcgctcaacgatttacacaagcacaatttcgtacacaacgacataaaactcgaaaatgtcttatatttcgaagcacttgatcgcgtatacgtttgcgattacggattgtgcaaacatgaaaacacaccaagcgtgcacgatggcacattggagtattttagtccggaaaaaattcgacgccacaactatgcacgttcgtttgactggtacgccgtcggcgtgttgacctacaagctgctaaccggcggccggcatccatttgaaaaaagcgaagatgaaatgttggatttaaatagcatgaagcgtcgtcagcaatataacgacattagcgttttaaaccacgttcgtaacgttaacgctcgtgactttgtctactgcctaacgaaatataacatagattgtagactcaccaattacaaacaaattataaaacatacatttttgtcatgaaaatgggtgataatgaaataaaatataaatttgtatattactttttaataaacgattcaaatatattataaaaacaatctatatctatctcttcacaatccataacacacaacaaatccatcaatgcgtttttgtctttatccgatacacaatgtgcatgtaacaaatcaaatacattttttaaattttcataaacatctttacattgtctaccaaaatttttaataactttataacaaggaaaggatttctcttcttgcgtagttttaccgcgcaaatattgaaataaaatgtgcatgcacgataacttgtgtttactaaaatgctctttgcctatgccgcaaaatctgccatatatttcggcgattacacgaggacaattgaacgattctaaatcgtcatgatcacctttgctatcgcgcaaggatttttttacagtctccgacaaacgaggtaataattcggcgggcacgcttcgatacattattcgatgcatgtaggttaccacacaaaatttattgtaccaccatccgacggtgctgttgtgagggttgaacacgttggcgagacgcaacagtttaccgtttctcatgaaatattcgaagcggcccaaaataatttgcagacaatttaacgtgtcttgagaaatttctcgttcaaaatcgttcaaagaaaatatctggcgtccattttgaacgcgcacatcgacgggaaccgctgcatcgatttgctccaacacttcacaaacactgtaatcgatacccatcgtttcgttggtgctaaaccaacgagagagactttcaatggaatctcgcgcgtctatcatcttgagcgcttcgtcaaaggtgcaattgccgcttttcaaacgccgcatagcggtcatgtctctctctatgcacgacgcgccgtctatgtacgattctgatagatattcttgaacaatgcgataatggagatacgtctcgccgtacacatcgtgcaccgcattgtatttggcataataattgtaaattattaactttgcagcgagagacatgttgtcagtaaagcgatgctaggctcaataatgctgttgttgaacattagtgatatttatatgaggaaagctgttatctttgtgacctgccacgtacaaaagttgatcgatgtttacaaaataaaaccaataatcattatacacgtttttattttataatacttcttgtataacctctctaactacattaggggtacaatctacgtcaattacacgtttggctatttttctaattttgtaatttttatcgtaaagcttttcgttaatacattgaatcgccatcaaaggattcgggtgcacaccgtcatacaacacttccatatcgtcttcaaagcgcatttttcgcttgcgaaaatgccgctcttggcccaaaacaaaagcaagttttatgtgatcattgatccgttccgaaaacacggccaaatgctggtgtttggtaatatcacgcggaaacgtcaccctgccatagttgttctccgacgccacgacggcggtttcgaccgattgcagcgtgttaagtttggcgtcgagttcgtgcaaacgtgattcaaactgctcaaacctgtttcccacctcgttcttgaaagtctcgtgggtgaccataaaattttcgctgtttgtattcaatttctttacatgttttaaaacagattcgatcttatcgcgtaaatcgtcacgttcgccttccgtttgaatgtgcaacaacgcggcgcttttgttggcaaaatttaaccgcatcaaaatttccagcagcccttgcttggtcgcaaacaatgcgcctaacgagctgatatcacgcttagattttggtacgtgtagaacaatttcgtttaaatgatgaacctgatcatcatcccaattgcaatcaagtatgtcgtcgtgtgcaatttcaagacctttgcaaaaatctattacattataatgttttgtgttggagtcactgtgcacgtatttgtacttgaaactatgcgtgttgcatttgaacgagtcccattttacgatgtgcgaccattgatgggcgtttacgtgatattttttgtagtcatctgagttgaaccggctatcgacgatgctgtcgtaactgtcgccggaccgcatccaccagttccataaccaggataacattgcttcagcttgtctaacaattcctttgttatacaacgagaaaattttgctcccttataattgtaactgtacggtgcgcgtatttgcttgttagcgttgcaaaaaatatccctgtctacgtctggccaatattgcaacgttaacgcgtccaagttagattcttgcgtttgcgtaacgtacaaacgtactgcctctttcacgcaatacgcaaaactgcccgggtaaatgtactcgctgtccaattttgcaggtttctcgaaagccttgaaccgatgcacgcgaacattttgggcggacgtaattttaaacttgtcggtgaatttcaaccacaaatgaaatccacggttaccggtgtacatgactctggacacgttctcttctgtgtaaaacagcaagaacgctgtggcgccaatgtaaattttcaacatcaagtcatgctcgtcaatataatttttgtaatcagcgtctacgacccattccctgccgcctccatcttccaacggtttaacgtgcacgtctgatactttgttttgcacgataaaactgtacaattgtgcggcgctatcaaaatatttgccggcgtgaatccagcgcgcgttgatcgtcatgaacgcatacttgcgactgtcgttgtacgcgatcgcgtcccacatcatttcgacgcgcttttgcgtatagttgcacggtagcatgttttttttgactataaaaggtcgccgttttaatttattgttataaactcaaaatgattgttcttcactgctggcttgtactgttgtgtacatttaatactgtaaacacggctaatatattagccgtgtttcctatgccagcttacagccaccacatagtatacagagtgtatatcgaagctctggctgaacaatgtcacaacgttacggtcattaagcccaaattgtttgcgtattcaaacaaaacttattgtggcaatatcacggaaatcgatgccgacatgtccgtcgagtactacaagaaattggtgtcaaattcggcaatgtttagaaaacgcggcgtggtgtccgacacaaacactgtgaccgccgctaattacgtgcacttgattgaaatgttcaaagaccagtttgataatatcaaagtgcgcaattttattaccaacaaccaaacattcgacttggttgtggtggaagcgtttgccgactatgcgctggtgtttggtcacttgtacgatccggcgcctgtaatccaaatcgcgcctggttatggtttggcggagaactttgacacgatcggagccgtggcgcgacatcccatccatcatcctaacatttggcgtgacaattttgacgccacagaggagaacacgatgacggaaattcgattgtataaagaattcaaaattttaaccaacttgtccaactcgttgctcaaacaacagtttggaccgaatactccgacaattgaagaattacgcaataaagtacagctgctcttgctaaacctgcatcccatatttgacaacaaccgacccgtgcctcccagcgtgcaatatctcggaggaggcattcatcttacaaataacgcgttgattacttcgaccatcagcactcgtataaacaaatcaaagagaaaaatagtctacgtaagttttggatcgagcattgataccaaatcgtttgctaacgagtttcttgacatgttaattgacacgttcaaaagattgaaaaacttaactatattatggaagattgatgacgaggtagtgaaaaatgtcacgttgcccgccaacgtaatcactcaaagttggttcaatcaacgcgccgtgttaaatcacgggaaaacggccgtatttattacgcaaggcggtttacaatcgagcgacgaggccttagaagcccgggtgcccatggtgtgtctgcccatgatgggtgaccagttttatcacgcacaccagttacagaaactcggcgtggcccgcgccttggacactgttacagtttccagcgatcaactgctaatggcattaaacgacgtgttgtttaacgcgcccgtctacaaaaaacgcataaacgagttgaatgcggtcatcaatcatgataaattaatatttccgcctctagataaagccattaaattcacagaacgagtaattcgatatagaaatgacatcagtcgtcaattgtattcattaaaaacgacagctgccaatgtaccctactcaaattattatatgtacaaatatatggtttctattgtaattaatcatttaacacactgaataaatgctattcgtcattatttacctggttttttgactgcgcacttcagcctttataaacgctcaccgatcagagcggatcattgttgtgttagaacgttcaaaggcgaaacatcaaaatggagtctgtaagctcgcgtttgtgtgttattagcaataaatttactctgcctgtgggttctgtgagaacacacaccgtcaccacaaacaccatcgccgccaacgtaaatcgtcaagagaatcgtcaaaaaatatgtcatatgatatcgtcgttgcataatatacattttaatttcaataagatacagtttgtacataaaaagaaactgaggtatttgcaaaatttgctaagaaaaaagaacgaaactattgccgggttggccaaaaaacttgaaagtgctcagaagaaaacgacacacaaaccgactcattggaaatactttggagtggtaagatgtaaaaacacaattcgcacgattattggcaacgaaaagtttgtaaggagacgtttggtcgagctgtgcacactgttcaaggcggagtatgtgttttgccaagcacgcgccgatggagataaagaccgacaaacgctggcaaatttgatgacggcaacattcggttctcgagtcatagtctacgaaaacaatcggcggttcgagtttaatgatccggaagaaattgctagtgccaaacgtttaattattaaacatttgcaaaatgaatctcaaagtcacattaacgcctattaatttaaatggcgaggaagagtcgaatagcgttgaacatataaccttaacgccaagcgttgaacatataaccttgatgccgcgtaatatcattgatactgaaatttgtttaaatgttaaatgccgttctccttttgcaaagttcaaagtatcaattgttatagatagctttgatagcgcttatattcaggcaactttttgtaacattaaagaaagtgtgacaattgttaacaaatccaacgaaaagcgtgtaatgtttgacgggtttgtaaggcctgacgacgaaggtataacattgccgcatatcatcggaccgtccatcgacagtattgttgccggccgcaaagtgaaggacgtggtgaattcaattcaaaaccaacagacattgttaaaagtatttattaacgaggctaatatgtataacaagtggcttaaaaaattaatttgtaataacaatgatgaatctgttttagtaaataatgtattaaaatttataaaagttgataataattatgttaatattaataaaaaaaataatgttactaaatgggttcctgcgttaaattattgtacgggtagacagctattaacaattttatttgtttttaaatttaaataaatgtgttgtttaaaatgttgcgctttattttgttaactttaatataacgaaaagatacatgacataaaacgcttccagttttggtcacacaaacttttgtgtggatagttcacgtaatgagtcaaataatcgggcaattgtccactaaacgtgtccgtggtcaagtagacgtgcatcagtttacgacaacccaaagccggaccgtttatgtcaagcacttttcttacaaaattggttatggtttcgttttgtttcttgtacaaacacatgtcggtgtgatcgttgacgcacgagttgtaaaattccgcaggcaagttggcaaacaagcatttgagatgcttgagtcgacgttcaattttataatcgaacttgttggtgaaaatgtcttttagcaaacacattaattggtcgttcaaaactcgctgcaacgacaacaccaacacttgatatcggtttccgaaaagcgaaaattttttaatgcagcggtccgtgttaaagggtcgtttcataatgcgcacgttgacaaaaaacacgttgaaagataccgtagctctagttacggcgttgctgatctcatcgacgccatccgcgcatgttatgtcaacttgtagcgcaaatctaaccaaatcaaactcatcattgtattgtgtttttatgcattttatatatcgatttaagtgcaagttaatttggccgtttaatttgtaggcaccgttttgatagcatttcagcaccaccaatggatcggccatgtgaacttgacgcgttagtacgtctaattcgtcgtaatgtcggtcgacgcaattttgtaaattaatttgcaagtcacaaaacgcttttgggcacaggccgtaataatcaaaatctaagcatttcaatgcgcttttgtcgtcgtcaatgtgacacgttacggccgcgcctccagttaacacaaataaaccggcgtcgttttcgcaaactacaacttcaaaacattctttgatgaacgacagctttgctctagcaacaattttatctcgcagacgatcctcaatatcttttgtcgtaatataaggtagcacgccaagatttagttgattcaacaaacgttccatgatgaatagcggcgacgcaacacgactataccgttcaaatgcgcacacaaaacaaactcttgcaactttatttgccaattgcaatcacaataagttctacgagtacactatctcgtttgtaagcacactgctctttaaaaataatttaaatctaatgggcgcgtgcaatttgataaactcgttaatctgctttgaactcaacatgtttggtaaaagtttattgctaaatgggttggtaaatttctgcattgttaacagcgacgggattacaattcaacataaaatgctaaccaacgtgttaagttttttattggaaaaatactattaattacatttacatgatacttaaattttaatactgttgttatcaatactacggacattatattaatcaagcaagagttttttctctttaaatttacgattcaactcatcgctaaaagacataggcgttggggacaatttacgctgcaaccccacactaacaggttgaatgggaacaggtggaactgcggggacggtcggaatgggaatccttacgggcttaatgggagacggttttttgtggaacagcttaaatgaaagcattggcgtgcgatgattaaacacgcacgcgtccggtgaaatacacgaaactttttgaggcacgctgtacaccaccggatcaggttcgttattgccgaaatagaactcgttgtccaacggcggtgaagacgtcggtgattgaggggttgcaataaaagatgaaagtgtttctgaaaccgtagacgacgacggagacaacgatggaggaggcggtggcggggacggcgttactacgaccgcgctgctcctgctgctatttctgccttcggatacaattttcagcagtctagagttactctcttgttcttcgtctcgacaatagtcgatgtcacaaaaatgtgccctttcggcttcagcgcgttctttcgtgcgtatgttgcgacgcatttctatcgattgcacgtacaaattccagcattgcatggccaatatcgcaagcacgcccgttataattattggataattttgattaaacatggtgggctcatgatcgctcacaatcattcggcacatgatgcatttcttgtaaatgttcacatatatacagttttggtttaaattttcgttttttgtataatcaatttttatatacacgatagagtcccagcatactgaatctaaatcgtagtgacgatataaaacatctaacgccggtaaatgaccgtttttaaacacatagatttgaaacgccgcaaacgacatccaaaatagcccagttatcgcgttcaccataatacacgcgatgtcaatgtaaacattttcaaattcatttgtgtttgaagaattgcggagattttttttccacacaactatttttcgtataaagtaaaagatgtaaaacagtgtccacatgccgaatgttaacattatcggtatagataaattaataaccgatggttttccttcaatctccatcaaaaatgcgtatttgctgtctatgactcccattgtagataataaaaatgctagcaagtttgaggcatgaagcccaatttgtaaaactgtagtgattttatttaacatattgaacaactaagtactgacaatatgtatcgagtactgatcgcgcttttcctgttcgtgtttatttatatagtgtaccggcccttctatcaagcatatttacatatcggacatgcccaacaggattacaatgacacattggacaataggatggattatattgaatccgtaatgcgcagaaggcactatgtgcctatcgaagcgttgcccgcaatcagatttgatactaatctcggcacgttagccggagacacgattaaatgcatgtcaatgcctttgtttgttagtgacatcgacttgcctatgttcgattgcagtcaagtatgtgataatccatctgctgcgtatttctttgtcaacgaaacggatatgtttgtggtcaacggccacagactcacggtgggcggatactgctccacaaatagcctgccccgcaactgtaatcgcgaaacgagcgttattttgatgagtctcaatcagtggacgtgtatagccgaggatccgcgttactacgcgggaactgataacatgacacaactcgccggcagacagcactttgaccgtatcatgcccggacagagcgataggaacgtcctgtttgaccgattactcggccgagaggtgaacgtgaccactaacacatttaggcgcagctgggacgaattgctagatgacggcgatagacggtttgaaatgcgctgcaacgcccgagataacaacaataatcccatgtttgttaatccactcaatcccctagaatgtcttcctaacgtatgcaccaacgtgagcaacgttcacaccagtgtgagacccgtatttgaaacgggagaatgtgattgtggcgatgaagcggtcacacgtgttactcacattgtgccgggggacaaaacctctatgtgcgccagtattatagatggactagataaaaatacggcatcgtataggtatagagtagattgcgtcaatctgtacagctctattctaaacttttccaataacaaattgttatgtcctagtgacaatttcgacagtaacaccgacgcagcttttgcctttgaagtgcccggctcctaccctctatcacgcaacggtctcaacgagccaacttatcgtttttaccttgacaccagatctcgagttaattacaatgacgttagaggcgagctgtcttaattggcaccataaacaataagtattacgtcagaagttagtatataagtcgtacaagttggcttgcagattcagtcaatatcaggcttttacaatgggcggtataaagttgatagcaacgtacgcgataattttatcgacaacgagtttagtcgtcggacgcgatcgtatcacgtttacgccgttagaagatagctcaggcctcttgtttgaacgcatgtacggtctgcgacattatacaaacgatagatttgtatttgtgaaaaaattcgatttttatccggtgctgcaggagctcaataatatcaaatctaaaattgaactatatgcatcgcgatttttaacttgcaaaatcgcaataaaacaaaacagatcgagcataataaaagcccgtatcgaaaatcggttgcagtttttgacgcagctgaacaaggatctcgtcagatactctgtggaggaaagctacaacgacgtactagaaaacatcaatttggaatatggtgacagcgctgagtttgaagtttatgatgattacgaacatctctcgcattggagcaacatgactgtatctgacgcgcaagctctactccaaaatccacctaaagacagagtgatgtttttaaaaacaatctctgccaaaaacacgaacattagcgaatatattaacagtaccattgaatgcacggatttagccaacataatgaatgtgttcaacgaaaaattgaacgatgcgtccgctttggccaagatgctaaaacgaataatgaaacaaacgcataagaacaaactcgatatctccaacactgttttagacgacggcatgctgttaacggaaatgaaaaaattagtgcaaactttacacaatcataatcgcgcgtgggttgtggattttaacaaaaccatgaacgatagtttcgatttatcgcaagcgtataaattgcatttgtatcttgatttaaacactgtcatcatgtttattaccatgccattactaaaagccacctccgtttcgtttaatttgtatcgtgttacgacagtgccattttgcagaggaagaatgtgtctgctaattgtttctgacaatgaatattttggaatttcagacagtaaaaactattacgtacccgtatcagacaactttaaacaagattgcaaaaagtttacgggatatgatgagtttctgtgtccggaaaccgagttaattgccactatgaatgcgaaagtgtgcgagattgaaatgttcatgggccgatatagcggtgatgtaatcaacatctgtgacatcagggtggccaattataatccaaaaaaagcttatgttaacactataatgaataatatgaaatggttatacatttttccaaactctaccaccttagtcgttcattgtaacgatgcttctaaatttgaaatgaccgttcagcctggagtgggtgttatgttatccactatgtctcaaacgtgtgcgattcgaataacgcatgatggtgtgaccgtcactgtagattcgagattatatgtcggctattcaactacattttggcccaaaaaaatatttaattttaacaattacatcgatccgtttttgctcgaaaaggcaaataccaattttttaccgactattgacgattttaatcggtctgttttattgcaactttctaacaaatttcgcattaaggactacacctcgccgccgccccaacattttttccgtccatctaaaatttacaccatcgacgaaacgtccgatgaaaaagacgacaacatcaacatcatcgtgataatgatcgccattgtcgccgcacttcttttattatgcggactaatgatatttttgttttgctgtataaaaaaacgctgtcgtcaatcaaacaatataattgtacattataaaaacaacaatgattttgttaaagttgaacagccgcgtgtgccacaaccattaccattgtatccttctttacttgaatttaacgattatgaacctgttgtgtatcccatgattattgaaaaaataaaataattgtattttgataaatgtttatgttttatttatctattaaatattctagtgcacataaatgcttaatagcagtcagttttaattttaccaattcgtctaaactatactgtttttcatccatttgacatatggcgtttataaaaagttcgctatgtttaataaacgaatcgtaaaccgaaggccgaaccttgagcacgatcggcgcattgtatttttgagtaaagtatgtaatatttttagtcaataaatcttcttcatttatatccaagtcggaacaatcgtttacaaaatttagcttttcgctttcgggcgcgtccagatattgactgacgagttcgagctgctcgacttggcctctgatatcggccgctatgcacaacattttgtcaatcgcattttcattgttttttgcataataatttttaacctttttattttgcaatttaattaaattattcaaacttgcttgattttttttacaaaaggcagttaatatgcaagacattttgacttataataaataataaaaacaaaaatttgattaattatttatttattcttcaataataacaaaaattttattatttattcttcaataataacaaaaattccaggcttaaaagctaacgaatagggcttttctgtaatctttttattattcatgtccgtcatttgcatttcttttccatacttgacaccgtcaatggtgcccatcataaacattttaatctcctccgaaggtccgtctattttgtccatttcaaacagtttatcaaaaccttcagtgctcattctctgcacatcgagaggagcgtttttaattcttcccgtggcgtatatcgaaccgttgttgtcacggttaataatgtaaaagcgtcgaataagcatttctcgctcgctggttttatttttatccggcaaatgaatgcacacgttcggttccattttcaaagaaaaatcgctttgcaaatgtttttgcaaaatgttaccaaatatattgttgtgtttatgaatgtctccgtattggatgctaaaaaactgaccaaagttgctcttagcacgttttatggtgccaaagtcggaaaaccaaaatccacaaggtttaccctgcactctcggaccaatggtgtacgtagtcttgccgttggccggctccaacacaacgatatttttatcgggctcgggatacagcttgtcttcccattcgtgcaaactgttcaaattagaaagtcgacaaaattcatttttcaaaaatctaccttcgaaacagctgcagttcattattgaaaaattgcctcttttcacattaatcgccatctgctcctgccacaacattttggttaactcttgcggctccaattgaacggacaacggcgtaaaatagcacattacgcccgtttcatcgtgtttcacgttaaaagcggcgccgccgccgttgtacggtactagctgttgatcttcttccgatttttcccgcttcggctggttgtcatcgccactttcaatcttgcgtttagttgccatgctacctacgtgcgctgtatgctgtggttcaagtctaattgaagcgttttacaaaatataagatatatattaaatatggacgaatccgttgccagcatgtgcgtcaacaacgcgttggaatacacagccgacgatctattaaaaaatattccttttagtcattccaaatgtgcaccgttcaaactacacaattacaccgttttgaaacggttgagcaacgggtttattgacaagtctgtagaaccgtgctcaattggtgagttgcaaaagtttaattttaagatagatcggctaaccaactacatatcaaacattttcgaatacgagtttgtagttttagaacacgacttgtccacggtgcacgtcgttaatacagaaacaaaaaccaaattgggtcatttaaacgtgtcgctgaaccaaaacgacgcaaacgtgctcacgttgaccgcaactttaacaagttaaaatgagcgatgacataccttcgttttatctaatcggtgaggataacattgccgagcacgtgtttgacatgttaatagaaagacatagttcatttgaaaattatcctattaaaaatgcatcgttcatcaacagcttgatcgttaacgggtttaaatacaatcaagttgaagatcacgtcgtgtgcgagtattgtgaagcggaaattaaaaattggtctgtagacgaatgtatcgaatatgctcacgtaaccttgtcgccgtattgcgcgtatgccaacaagatttccgagcgtgaatcatttagagacgatcaacggacaatcaacgctatattagtaaaagagggcaaacccaagtgtgtgtacaaatgcatgtccaatttacagtcacgccagaacacgttcgccgacttttggcccgcaacattgcgtaacatgattactagcattgctgaagcgggattattttacaccggccgcggagacgaaaccgtgtgtttcttttgcgattgttgcgtgcgtaattggcagcacgacgacgaaccgtggcgacgccatgccgcagagaatccgcaatgtttttttgttgtatccgtaaaaggaaaggactacattgatgaacataataataaacgtgatacaaatcaactaaaactcgacaatgaacatgacaatgttaacgaaacggaaaaaggaatggagtgtacaatttgtttagagcgtcaacgtgatgcagtgcttttgccatgtcgacacttttcaatttgcattcattgctactttagtttagacaaaaagtgcccgtcctgccgacaagacgtgaccgactttattaaagtgtttgtcgcataaataataatggtttatctcgtattttacaatggtttcaacgttgaaaagaaattttcaaaagaatatttgaatcatatatattatgatcaaatcgcgcattcgatacagaggaagataattccggacctgaaaaataacgtggattgggagcgaagcagtcgcaaacaattgcatgtccttaacagggacgtgtacaaaaggttgttaaaatgcgacggaagatattattggccgaacggttaccgctttttgtgtaggccatacaaaacgaggcgtcaagcgtatcacgaacatgaaagattggctaatcataccaacagcatccgagagaagaaatatcaacgtataagatcaccttcatctgtggacactgtgaaatatccttcttcttccacgccaattccagacagttggtacaacaacaacaacaacgacgacgacgacgaattggaacaatacggtcgtttgaacggttatcatcgggaaaaagaagtactggaagatggcgaaatttttgaaaactaaattttattgtctttaatgaatattaaataaaaataccatttatttaattattttttattttttaaaacactgtacaattaagattagacatctttaaaaattttttagaccaaaatcgagaaatcttcgccgcaactcttgcaattgcatttccaaattttgtaattctcgatcatctttagtgatactttttaatcgttccaaatgatgcgatttaatagtaatttcttgctttcgtctatttatctcgcttagctggaatttcaaatctcttgtcttatccgcctgagagtacatcttgaataaatgagatgaaaacgtcttcacatatttatctgtgtggctattatttgtttgtacacatcttccacaaaatggttatttttattgcgataaatgttaatgttgacattttgcaaatgtcgtaggttaaaggggcaaatgggctgcgtggccgataaaagtttccaatttaacaattcctcttcgcccccgttcagtttgaaaatggcgctacacgtttctgtgatatcgtgttcctgttgagtagcgcacggttcgaccagtatcattttgtgatatgcagttttgacgctcatgtgcaacggaatgatttgcggatcgtcgcagtcgtcggaattgagctttaaatggcatccatatgctttccaaagagtttcgtcgtcgatccgacctattgattgcaaatcgatgcggggaaattgcgctctgtacaaaacgcctaaatttaaaaattgattgcactgttgcagctctgtccaatcgattcgatttttgtaattttgaaacagcattaagttgaacgctgcgctggctcggacgttcgtaatcactgtgtaattgatcaacttgttccaatattgggcattgaaattttcttcaaatccatttctaaactctgaattcacaaacatgtgtttgatgtagtatgcgggcggagagttgaacgcggtccatttgtcaatacatttccaatctgaatgtaacgtgttcgccaaaccgggatattcgtcaaacacgagcatgtgatctgaccacactatgttgtcggcaatcgctttcaattcttgcacgcggccttcgcgcaagcaatacaaaatgagtgcgtcgctgattttgacgcaatcttgcatgtacacagacaaattaacgagttccatacagcgcgcatcgttcatcagcgccacgttcaagtgtttgtacttacacacgtaatcataattaatgtaccgtttaatgggttcttgaaaccattcttttagtaatgtgtgattggtaactatatgtttccaatttaatctgtgtgcgtatttttgctgcaccgacaatgacaggttgttgtaatttttagaaatttcctccatgtccaacaggtcaccaaacgcgagtataaaatcttgcgtcaaaaatttctgctcagacaccaacgaccaaattagatttaatttgaacctgttggcgatcgttatcgacaacggggattttgaaacaattttccaatccaatttgttacgaaacacgtaaataaaatcgacgcgtccgtaacattcgcgcgatatgctcttccaaaacatgttatcttgaaaatcgagcaaataatggcgatttttaagagatttgacggccaattcgataatttttatatattctttttgttttaaagcacgctgtagcgcctgggtcggagccatgtcgacttcactaaacaaaatgtgaaatattttattaagaaacaacatgaaggctatttgcattatcagcggcgatgttcatggacaaattcattttcaacaagaatcgccgagtcattcgcttaaaatcagcggccacttgttaaatttacctcggggtttgcacgggttccatgtccacgaatacggcgacatgagcaacggctgcacgtcggccggcgagcattttaatcccaccgacgaagaccatggcgctcccgatgccgaaattaggcatgtcggtgatttaggcaacataaagtcggctggttataacgcgcttaccgatgttaacataatagacaacgtgatgtctttatatggcccgcacaacgtcatcggaagaagtttggtagttcacacggacagggacgatttgggtcttactgatcatcctttgagcaaaacaaccggcaattccggtggtcgtttgggatgcggaataattgccatagctaaatcttgaacatgattattaacataatcaataaatgatgtcatctgtttttctgaactctgttgaactgtttaatcataaatgagtcaataaatgatgtcatttgtttttctgaaccgaactcgctttacgagtacgattctactcgtaaaacataatcatgggatgactaatttgtttttctagtgaagtgaaagatgatgtcatttgtttttctgaactcggttgaactggctttacgagtacgattctactcgtaaaacataatcatgggatgactaatttgtttttctgaactccgttgaactgtttaatcataaataagtcaataaatgatgtcatttgtttttctgaaccgaactcgctttacgagtacgattctactcgtaaaacatgatcaagaaatgatgtcatttgtttttctgaattcggctgaactggctttacgagtacgattctactcgtaaaacgtaatcatggaatgactaatttgtttttctgaactgaactcactttacgagtacgattctactcgtaaaacataatcaagaaatgatgtcatctgtttttttgaactttgttgaactgcttaatcaataaatgatgtcatttgtttttctgaactaaactcgctttacgagcacaattctactcgtaaaacataatcatgggatgactcatttgtttttctgatgaatgtcatctgaactcgctttacgagttcgattctacttgtaacacacgatcgttttgctgaattactcaaaatccatcaattcgtaagcgttcgtgtctaggtcaggcgttgaaaagttgtagcttgccataagttcggacagagactcgaattttgtgagtgttcgcaacacacgtttggcgtcatttttaaaattactcgaagagagacaataaaaatattcttcgataagcattaccactcccatatcgctgtttaggtgctcaacgtaatcgttgcattctatgttgcgtgcacctcgatacgcgtggtttcggtgaaaatcgcaccacagccaatcggcgtgtgtgtaacagagccgacacctaaacaatttatcggtttccaaaaaatttagatactcgatggttttgcagttaaaattgcgcgtttgattgactctaaaatcgtcgtcggcctctataatttcaggcaacagtttaccctgttgtcccattgtgtcgatcacctcgcccaggtgtcctggtgttaaattaagttgttttaaagcatcaatagctttttgcacgtcggcctgatagtttttgaccacggaagtcggttgtcgttgaagagaaataaacctcggtgtaggagtcggtcgtctattacacaattctatcagaggtggaggcaaaggaacatttacagccattgtcatatttataagtaatagtgcaaaatgcaaatatttattaaaacattaacgggcaaaaccattaccgtggaaacggaagccgcagaaacggtggccgatcttaagcaaaaaattgccgataaagagggtgtacctgtaaaccaacagagacttatctttgctggcaaacaactagaagatttaaaaactatggccgattacaatattcagaaggaatctactcttcatatggtattacgtttacgaggaggatattaataataaaaaccataaatatacattaaattttttatttaattcgacatgtttgtatcttgtgtattatcgctaaccatcataggggtcgaagttacagtattgcggcgattttttatagaagaccgctgtttggccggaactgagcttttcctcttcctgctaccgctgccgctaattggagtgggcacatattctgtggaaggtgcaaccggcaacttgagcgccactgttttaaattttgccatacttttagtgatgaaatcgcgcgttaacacctcatcgtaaatgctgctcaacaaaggtgcaacattatgattgaacgtttcgtttaacaaactataaaattccaaataaagcttatcgcgcatttcacaattctctttcaattcagccaaatttgcgtttgttacttgtcgttttttgctcactggaatttctacattttcgctcgaagacgacgatgtcgatcggtcagtcatttttttgcccaatttctcggtgtgatcaaaaatggacacaaaatctgtcaattcaggcttgtttttcactaaatcccacatggccgggctgctaggccactcggattgcttaatcttggtgtaccaactgttaaatagaatatatttattgttattaatcactttcttcttgcgcttggacattttgcgttcgtcctgcatgacaggtattacgtttagaatataattaatgttctttttttccaaaaaatttacaataaccgccaattgatccatgttagatttgttgtaagagctcgattccagtctattcaacagcctttcgttaacagctgctacaatttctgtatttaccatgattgatttttgtaaatttttgaaacagcacgtttgtattcttgacggtatgtttttttaatgcttaacaatctgtcaattcgtttatgatgaagagacaccttacgctttgaacatttgtcagtgattactgtaaaatagcctaaattagctcttatatattcttttatacgttcaaacgacgagatgtccaacatgtgcgcgcagacgttttctgtcttcatggtatgcttgagcgtgttgatgacttccctgaacagcgcttggatttcactgcgagttaagcagtccgaatcacacccgcctgaatgctggcaaggtgataccatcgttgttgtcgatctttttcagagtggcataaaaaaagtcctgcagctgtttgttatcaaagcgcgttttaatgttgcgcacaaaatcaaaaaattcaatgtaattgctgtaatcgtacgtgattagttgcttgttgttcatataattaaaatatttgttgagcggcacgattgccaagctgcgcgctatttcgcaattaaaacgtcgcggtttcaacactatacgataatcgttgccaaacgtgcccggcaacaacttgacagtgtatgtgttgggtttggcgttcacgtcgatcaagtttccgcgcacgacgcctacgtatatcaaatacttgtaattcacaccatcatctttccattgtaacgtaaatggcaacttgtaaataaacgcgctatcaaaaaacctgccagtttcctccacaaactcacgcacggccgtttcgtaaactttcgcgtcgctacaatcacgatggccccgtggtatggatattttttctaaaaaagtgtcgtttatgtcgacggcgggcgcgttcgcgctccgatacgcccgacgagcgcacaacaggacggccttgtccggttcgattatcataaacaatcctgcggcgtttcgcattttacatatttgacacttaaaaaattgcgcacgcgagcaccatcatttgacatctaattgcgactggatttatcacatttacgctgcaccaattttaattttttagttccgtctttgttcagttgcaagttgactaaatgacaaaaattttcagttctacaaaaacgaccttgttcgttccacccgttgtatttgaaaagattgggacggtaacggtttgtttgcacaatgtaaacttgtgaaattttgttactctcgtcgaattggcgactttccacaatattcatcaacgagggccattgcaggttgtcattatttatactcatcatataattcaacaaaagctttttgtgcagcggaactccaattcctgtggaacatttttcaaacgataatttaattcgtttctctgtggacaacatttcgtgcttgattaacaatcgcctgacttttataaccacgtttatgtctttgcacagtaaatgtaaattttcgacaatataatagtgcaacgcgtttgttatggcaaaggcgtaatttgatttgacaacgcccttgtttctgatgggcatcgcagctttcaaaattatttgcaaacattttacgaatacgtctttgtgttttatcaataatatagacaaacatcggcgaaatagtttggaataattataaaagcccaaattgcaggttttggccccttttatcactcgttttataataaacataatttgttgtcccatatctgcgcccacaactttaattaaccatttgtgcgcatattgattatcttgccgttcccatcgatccgtccgttcgtcgtatgtcaacgttcctgcttgcctgattatgggttctaaaagacgaaacagcagtgtaaatttgtttttgcgtcggtaatattttggcaggcaataatcaagaaaatccataatcaattttttacatctattagtattcgttgcgtacgaatcgaaattttcaaaaattacttttctcgtattatgaaaatagcgtttgggtttttcacaataataatcttcattgtaaaacagaaacggtttgcgagaattggcacgtttgtccatgacggaacggtttagagtaacgaatgatcaaaatttacaacacgctttccgtaatgcgcaccagttcgcacacgttttccgcgtatgtaatccatgtttatttcgctgtcacaattaattacacgattgtgttgggcggcacgttttattgagtttaaacggcgagtcgacaactccagagggttgtaaagcgcagatttttccaaagtaaacgagtttaaatgaccgccgttgaaccactccagagctacgattgtgtacagcaaaatataaatttctttgtcgacattatcaaacacaaacttgttttttaaacagtaatagtaaaattttaacgagttgtataaataaaacatgaaattaccatttctaaagtaaaattctacgtccgtgacgaacaaaaggtttacgattttgttctccaacaactgtgccaattttctcaagtacaccatcgaatttttgtcgtcatctatctcgatcaacaacacgttaggtgttttgaaattaaaaattattttaaaattttcctgttgcatcgattccacaatggccgaccaatatgaagatgctacctcaagacaaatgtacttcttggaaaacacatgacgtttaataacctcgctgatagacgtgatcgattgtaaatacttttcaaacttcgcgtcttcccaaccacgcactgacatgggcgtcgtcgtgtcgggctgatgtttgaaatccaaaccgctctgaattaacttggttgtgatccgtatgctcaactgctggcccaacgtgtaatggtcttcataggcgcgctcccacatcacgttacacacaaatttgacgagatcatcgacatccttctgttgtaaaattcgcctcaaacgggccacatcgcctttgtaccaccgatctcgacacacaagctgtaacatttttaaatcgtgatcgtttaagctatcaattctggttagatttatgtagtcgtcgatatcttcgggcgtggcctgcttcatgtccgtaaaacgtgcgaaatcaaatattttgattttgtaatcgaatctaataaatccatcggcgttcacttgcacttcgcgatttacgaaacgtggaagggtataatcgaacccgtttaaatagattgcatacaaaaccaacacttcgtcttcaagtttgcacgcttgcggcaaaaattgtgtagtgtgcgccaagtgggtgacaaacatgactactacggaagaattttacagacgactagaatacgtgggcacgatcgccacaatgatgaaacgaacgctgaacgtcttacgacagcatggccattgtacgcaacaggatgtagattcattgtgcatgtcagacgacacggcggcatggttatgcggtcatttgccgacctgcaattttgtatcattccgcgtgcacattgaccagttcgagcatccaaatccagcgttggagcattttaaattcgaagaaagtctggctcaacgccaacacgttggttcgcgttacacgtacatgaatcacacttttttcaaaaacatcgtggccctcaaattggtcgtgtacacgcgcacgttacaatctaacatgtacgcggacggattgccgtattttgtgcaaaatttttcagaaacaaactacaaacatgttagtgtttatgtcagaaaacattgtgcaatacaaacaatgtcattaccggtttatgagcaaactatcgaagatacaataaatgaactattcgtcaatacattgtaaatttattgagctagtaagtcatcatgaacacccgatatgctacttgttatatttgcgacgagttagtgtacttgtttaagaaaacgtttagtagcatgtcgccttcggctgctgcgttttaccaacggcacatggccattgtcaaaaacggtatcgtgctgtgtccacgctgttcttcgaacgactcgattccaatctacccttatcgcggtcaacaacatgcaagaaaatctcgttaagactcaagcgctgcgagttttgtcgaattcgcctctcccgctgtacgactcgaccatcgatagacacggctgtaaagtgttcacggtgcggcgctacaacagacgcgtgatcgattttgcgggcattcgtaacaaaacgctggaaattattaaaaccgatagaaatttgccgctcaacacagaatgcaatgtaaaagttgtcgacaacgcttgcatgttctgcagaaaacgcttcgcaatctaccccgccgttacctatttgcattgcggacactcgtgtctgtgcaacgactgcgacgagatatcaaacgtggacaacacatgtcctaaatgtaaaagtggcattagatacaaattgaaatacaagactttgtaacatgttgccgtacgaaatgacgattgcagtgttggtttacttgtcgccggcgcaaattttaaatttaaatcttccttttgcataccaaaaaagtgtgctatttgccagcaactcttcaaaagtcaacgaacgtattaggcgccgtgcatgtgaccgcagcgacagagatccctatttttattacaaacaatttataaagtttaattttataaataaaaaaataatatgtgaaaaatgcataagagtgacgtttgacggtcggtttgtggttacacgcgacattttaatgtgttttataaaccagagctatataaaacatttgctgcgcgatattgacagtcatgttacattacagcaactcgttaaaatatatagtccagagtttaagtttcatataaatagcaaaatcgagtttgtctcaatcgaatgtgtgttggcgtctatttgtttgaaacattcatacggcaaatgtgaatggttggacaaaaatataaaaactgtgtgtttgcaattgagaaaaatttgtaaacataattcaacatgtttatcgtatttcataatgtaatgttaactatataataaaatgatattgatgtaacaaacttttttcatttcaatcccatagtttaaataaaacaaaaaaataaattgtatattatttatttattaaactgtttaactttaatgctaacgcgaacacatcacgttgttctgcagtagacatggagttgcgcagaaaattcttgatcgtgtcgatttcttcgccgtcgtccacttccatgtacttgatttcttcctcaatttgtatttccaagtttgcgtactcttccaaataataatctaattgttgggcgacctcgccaatttttaataaaacgctgtccggtactaaatgccagcgggcgactgtcatcttgttacttttttaatgtaaaattaaaaaattgttacgttaatatatatgtcgtcaacgttaatgctcactatctcgttagatcgttttcttcataattgtattgttgcacatcaacaagctagacaccacgttaaactcgccgcagtcttgaggcaagttggatccaccgcgcatccaatgcaaactttcagacattctgttgcctacaaacgattggttctttgtccattgatcgaagcgtgtaccttcgactttttcgtgtcctgtatgactcgtcttaatgaattctttgaaaatgttgtcaggagtattgttgaatagcatatacggtatgttgaaaataggataacgctttgcttgcgggtcgtcatgatttccaccacgcactacatacttacgctcgattttatcgaaattggactggcgagacagaaacgagacgggcgacaggcatatttgggcatgtgtgccgtcttcggccatccactcggtcagatcttcgctgcggttaaacacacctttctgaccgtgaataccgcatatttttatgccttctaaatcgttggtggatgtgactatgactattttaagcataacgttgtcgccgctaaccaccatacttgcgtcgagattttcaattttttggtttttaatttgtctaaagtagacgtacactttgtaaacattaaaattgccattggtgcatgtctcaattttgtaccgtcggccgtcatacacccaattgatcttcgcctcgctcaccaacacaccggccatgtacagcacgaggccgtcgtctaacgcaacgtagtttttgtcggtactattcgtaaactttactaaacacgattgcttagggccgatcgctagcttacccttcagtttgttaattttgttgttgtataagcaaataggcaacgccatgtgcggaatgtacggatcttcggcggtcatgagtttattgtctcgcaccagcgtccacaatttaaacattttattgttgagcaaaatggacttgtttactcccacagaatatccatttggtagatccgatatctcttctttgtactcaaacacgggcatggcattctttagattggtcagggacacaatcagtttaggtattggtattgtatgaaataaatgtataaaattatgataataatattgttccaatttggacatgagcgatttgacatcatcgttttctacgatcgtacactgaataataggatcgtaatatatggaatgtttgtaatggtattcgtagggtgtcaacaacacgttaatgttggtttcgttgttgactcgtaactgttttttgatgcacaccattccttcgtgatggttaacgtaaagtattttgtctgtaatcttcaattcgatgggcgacatgtttcgtttcatcgtgtacacaataaaagctgtgttcgatttcaaatattttaaatttgtgggtctatcattgaacgcgatcaacaacgagtcgttttgaacgtcgttgaggtcgtccacaaatgtgacaaaattgtgttttagcaaatattgaaatttttgcgcaaccatttcgtagtccacgttgggtaaacgtgcgttgcggcaaaggaaaaactttttgcctgccacggtcatttcgccgtgaaaaaagctgccgatgaattttacaaaatcttttttttgcttcaacattttctggcgcatgctgtcgttagtgattcgagccacctcattgcctacgcgatattttaatacgggcaaagaaatttcaatattgttattgctactgttgtcctgttgatttggaaagactttgcgttgcttgctaaaagtttttgatacacaatagatgagacgaccgttgactatacaatctacaatctttttcgattctttgttgtacaaaacactctgaattttacgacgcttgtttgccaccgtgtgagtgtcgctgtcggcggcctccgccttgtcaagaactcgttgatagttttgtaaaattgtcgaagttaataacaattccatcaaataggcgtgtttgtacacaattttgttggccaaactgtcgatagaatagtttatgtcgtgattcataataatttttatatgttccacgagctgctgtttgtgaagcgcgttgtattcaaagaggaaatcgagcggtttccatttgccgctgttggccaaatatgtttccaataccgaatttaaatcttccgtcaccacgtaatcgctggcgtacacgtctcgagcaaacaagatatcgtcttgtttatcgtaaactagttggatggcgcgattgatatgcttttcttgatccacgttgccgtacagaaacatgcgtttgcaatgtttagcatataacttgtcgtaaaaattgtgcaccaaaatgttgttgttcatcattatgttgggaaaacttaaaaatctgccgtccaacatgaaggttcctttaatattgttgtttgcgtctgcatcgttagattctctaaattgtttgtctaaacgcgtgccaaatataacaggtacacatttgtgcaatacgcaattcaactgttcattaagagcgcaacacaaataagatttgcgttcttgaatagcgcacaaaggcatagattcatcacagtttgtagcgcaatcaaaagtaaattttaatttgtatttattttcaattctttcgtacaactcgttaaaatcttgaaccacgtccgtcatcgcgaaacggtcactgtgcactgattatgtctaaacgtgttcgagaacggtcatatatttcagatgaaacggtcaaacgcactcgacaaacccagcaatgtagtgctagaaacgaatcttttttggggttttgcaatttggaagaaatcgattattatcaatgtttaaaaatgcaatatgtcccggaccgaaaatttgacgtcaattttattttaacagtgtacagaatggccaacgtggtgacgaaacaagttagaccgtataacagtgtggacgaaaagcaccactacaacacagtgcgcaatgtgttgattttaataaaaaatgcacgtcttgtgcttaccgatagtgtcaaaaagcaatactatgacgatgtgttgaaattgaaaaaaagctcagacttggaatcgtacaatccgttgactacggtttttctacaagtcgccgaatcttttaatacattaatacaaaagttgaggaaaatttttgtcgatttttatactaacaaacccgacaagtcggacataaacaacccaaatatagtttcgtatcaatttatttttatcagagtacagaaattgtataacagagcaattaaacaaaaaactaaaactataactgtaaaacgtcctacaactatgaacagaattcaaatagattggaaaagtctttccgaagaggaacaaaagatgactagacaagagattactgaaaaaattgtaaaaccctgttttgagcaatttggtactatattacacgtatatgtatgtcctttaaaacataatcgaattattgtcgaatatgcgaactcagagtcggtacaaaacgccatggttgtaaatgagggtactcgatttacaataacagagttttccgtggttcgttattacaacatggtcaaaaccgaaatggcgaaccgtcgaattgacataataaacaaagacatttcgattttaagaaacgctttaaaatcttacacataaatcaaaatatcaaacagaggaaaaaaacagttgtaacaaaaataatcaacattaaaatttacaagttttttgttagtgtcgtactttttaataacacgtttgttgtttatggaacattgcaaacatattgtggacggcgcaaaataacaaacgaaaggagtgtccgcgctctcccacgctattctaaaacgatgaatccatatcaatttttcattttcgccaaatgtcgatccaacggcctccttccaataacaaatgctcagaaatacaaacgtatacagttgctgtcgcggcgttaactgtttccttttctccaaataatctattatgggaaacagacactcgttgcagcacaaatattcattaatcgtcacaacggacaagcacatctgacaaaatgcaccgtgatttttgtatggagtagattctatgagaagctcgttgtccataatgtccctggtccatttttttaacaaaacgtttttatatttgtaatttgtacaacttttgtaggttttagaatgcttttgatacgctttgataagtttgaaactgttggagtaaggccacgtcattatgttgtacacccttcgtttaaaagacaaaaattactacatgttcaaactatttaaggattattggccaacttgcacgacagaatgtcagatatgtctagaggaaattgatgataacgggggcatagtggcgatgcccgataatggcatgttgaacttggaaaagatgtttcacgaacaatgtattcaacgttggcgtcgcgaacatactcgcgatccattcaatcgtatcataaaatattattttaacttcccccccaaaacgttagaggagtgcaacgtgatacttcgagaaactaatgggtttataggcgatcacgaaatcgatcttgtttataaatatgtttatcaacgcgttacacaggaagacgctctggacattgaacttgattttaggcgattttttaaaatgcaatcatgacgaacgttttattcgcgtcggacgtcgacctgatcaattgtatattaaaagataatttatttttaatcgataataattacatcattttaaatgtgttcgatcaagaaaaagatcaaattagatctatgtgcctcggtgaaattgacacctttcaaaccgatgcgaccgccgaagccaatgcaatgctggatacatcctcgacgagcgaattgcaaagtaacgcgtccacgtaacaattatttagatcccgataatgaaaatgacatattgcacacgaccgtgttaaacagcgtgtttctcaacgagcacgctaaattgtattatcgtcacctattgcgcagtaacgatcaagccgaggcgagaaaaacaattctcaacgcagacaacgtgtacgagtgcatgttgattaggtcaattcgaacagaacattttagaagcgtcgacgaggctggtgaacataacatgggcgttttaaagattattatcgatgcggtcatcaaatacattggcaaattggccgacgatgaatacattttgatagcggaccgaatgtacgtcgatttaatctattccgaattcagagcgatcattttgcctcaaagcgcgtacattatcaaaggggattacgcagatagcgataatgaaagcgacgtttgcaatgaactcgaatatccttggaattttattacggtaaaaaattgtattgtttctacgaacgagtctcggcaatcgcaatacatttaccgcacttttcttttgtacaatacagttttaactgcaattctcaaacaaaacaatccattcgacgtaattgccgaaaacacctctatctcaatcataatcaggaatttgggcaggtgtccgaacaataaagatcgggtaaagtgctgcgatctaaactatggcggcgtcccgccgggacatatcatgtgcccgccgcgtgaaattatcaagaagatttttcattacgcgaagtggactcgaaatcccaacaagtacaaacgatatagcgaattgatagcgcgccaatccgaaaccgacggcggatccgctaatttacgagaaaatgtaaacaatcagctacatgcccgagacgtgtttcaattgcatttgttagattgggaaaactttatgggtgaattcagcagttattttggtatacacgcacacaacgtgtagcagcatagtattaaatacctgacctctttgtttaaacaagcattcttatctcgacgtgtgacaacgcaaccatgaaaaaagtatcacttggaaaaataattgagaacacggtggaaagtaaatataaaagcacgtcgtcgtcgataaacaccagtgcaaaattgaatttaagcgaatattacaaaacttttgaatctaataaagtaggccgacaaactacgtataatatggtcggcatgcgagattacaaaaaaattgacgaattgctgaaaaaatattaacatgctgcgatcaattatgcgacgttttaagagtacaaacaatcttagcaaaaaaccctccggtcattatgtggtgttatgtccaaagtgttattttgtaacctcgtccgaagtgagcgtggccgaatatgtagaaatgcataaaaatttcaacatgaaattcgccgatcgatgtcctaacgattttattgtgactaactctaaaagttggaacaattacaaaaactgttctgctctatattatcctctttgttaataaagctgtatctttttgttaaataaaactttatatttgtatttttgttgtttatttttataaataaaagaattattaattaatagttataattatattcatcgtcctcatcctcgctggtatcgtaacgtggcagtgtgcgttttaatcgtttgcgcgtcgacgcaataggaaatttagatttcgattgcttagcaacgcgtcgtttacgattattgaacgtgttgacacgccgttcgtcgtcttcagtgtcatagtccgtgcttgtgttttcgttgttattttctacaaaacgatcgtttgttttagtaaaattatcagcgttatcgtcgctttcgtcgacgtcgtccctaactatttcgtaagcggctttgcggggaatccaagaattttgcaatgtatcaactttaacatacttttcttcgagagcttttttggctttacgcatagcaatgtcttcgtcgccaccgttcattttatgatactttgtaaacgtttcgacaaataactttttggcgcgagaaggcattttttcattgtacaatagatctggaatttgatacattgtattttagtcaagttcgttttctgttgtgctgtattcagtgtctgtatcctctgtactagtagtgtcactattgttggcgtcaatccttggttgccatttaccatctatgaacatgtattttttcctgacagcacaacatgccaacttagtggctatttgtgtcgacttatattttttcaaactacgatcgtagaatttttcaaatatcctcttaccgttatagggaaggttttgataatatttaggcaacatgttaataaataaatagcatattaataaaaacagttgttttattatcactaaaatggacgcttacaaaatcacaaccgcgttaatgttcttacattatgagatttcatagttacttaaattctaaactgacgattcgattttatttaaattaaattttgaagcattttttcgctatcattttcaggttcaaaactatcgttagtgtgatatttgttgactttaagatattcaatgttctgctcatttttaacgataaacacgcgactcttttcgtcacgtctcaccattacgccatttttacaaattgatatgtatttgtaaaacggcaataaagcgtcgcgagtttttttaagcaacagcttttgatcggctgtggcggctacaaatatttttaccggcccgtcatagttaatgtttaaattaaaattcttaagtcgacgctcgcgcgatttggtttgccattctttagcacgcgttgcgtcgcacagcttggccactatgtggtttttgtcaaacgaagattctatgacatgtttgaaattcaaatctagtagagtacaaatttttttcaaataatagtttctaatttttttattatttagtctgctgtcgtgaatgccgtaaatttcaacgctgtctgtaagattatcgtattcaagcttttttagtttttcgttcatagacttgaaattgtccgacacattttcgtcaatttgagttctgatcaacgacttgagcagagacacgttaatcagctgttcaaattgatccatattattgcgatgcgtaattggtgcgtaaaatatattttttaaccctcttatacttgcacttcgcgttaatacatgttcgtgtgcagacgtttaatatgttttcttttttgcataaatctcctactgagtttgacctcatattagatccctacaagctgcaaaacgtggcattctttacccatgaagagtttaaagtagttttaaaaaatttcatctcagatttaaaaaaaaatcaaaaattaaattattttaacaatttaatcgaccaattaatcaacgtgtactcagatgtgtcgacgaaaaacacgcagcccgaagcgttgactaaaattattaaatcgacttgtgttatagtaacagacttgccgtctaacgtgttcctcaaaaagttaaaaaccaacaagttcactgacactatcaattatttaattttgccccattttattttgtgggatcacaattttgttatatttttaaacaaagcttttaattctaaacatgaaaacaatttggtcgacatttcgggtgccctgcagaaaatcaaacttacacacggcgtcatcaaggatcagctgcaaagcaagaacggatatgcggtccaatatttgtattcgacgtttctcaacacggcctcgttttatgccaacgtgcaatgtttgaatggcgtcaacgaaatcatgccgccgcggagcagcgtaaagcgttactacggacgcgatgtggacaatgtgcgcgcctggaccacgcgtcatcccaacattagtcagctaagtacgcaagtatcggacgtgcaaattaatgagtcgttcacagactggaacgtgaaagtgggtctaggaatatttcccggcgctaacacagactgtgatggtgacaaaaaaattattacatttttgcctaaacctaattctctaattgactcggaatgtcttttgtacggcgaccctcgatttaatttcatttgctttgacaagaaccgtttgtcgtttgtgtcacaacaaatttattatttgtacaaaaatattgacgcggtggaggcattgtttaaatcgacaccgttggtttttatcctgtggcaaaagcataaacatgaacagtttgcacaaagactggagttgctgttgcgcgatttttgcctaatcgccagttcaaacgctagctatttgcttttccaacaacttacacagctcatagccgacgaagaaatggtgtgcggagatgaagaaatatttaatttaggcggtcaatttgtagacatgatcgaaagcggcgccaaaggcagccaaaatctgattaaaagcacacaacagtaccgacaaactttaaatacagacgttgagaccgtgtcttcgcgagccaccaccagtttaaatagttacatatcgtctcataacaaagtgaaagtgtgtggcgccgacatatatcataacacggttgtgctacagagtttgtttattaaaaataactttgtttgttacaaaaacgacgagcgtacgattatgaacatatgcgctttgccctccgagtttttgtttcccgaacatttgatcgacatgtttattgaatgataatataaatgagtttattcgatttgttgtaatcagtatcgttcaatattcaagacatcatgtacaataaatttatgatctatcttcatttaaatggcctgcacggagaagcgaaatactataaatatttaatgtctcaaatggattttgaaaaccaagtagctgatgaaatcaagaggttttgtgaaactcgtctaaaaccggcaattgatctcaacactttaaatgaagaatgtctcggtacgcttgtagatagtttagtctgcaaaaatggtatcttgaatccttacacaaaagaggcgcagtttgctttgcagtacatttttgacgacgacgaaatatctaaacgagatcaagatgaatttaaattgtttttattacataattataacaattgtgaaaatatggaaaaatatattttaactaataatttcagcatagcagactatgaatttgaagacatggttgaaattattcgtattgattgtaaagatctgctctcaatataaagtgtaattaaaattttgttgttttatttatgatttacgccaacaagactcttcatagttatgatcgacgggtgtgtccttttgtaattggcttctgaccactttagctattttggcgtatctgcattcgtcgtctagagtttcaaacaccagatcggcgcaattataaaatccctcacccaccggatctatacgttgccaacgcacatacattacaaattggtttgatctgtacggaattactacgggtatagaatatattaaactgttatcacatagtagatcgtttgaatttggaattaaatctgaattgttacctcctatgaattccaattcgttccaagttattggattgcgacgatcccagtttgatttagtaataaacacttcaaagtaactgggttcgtgtatggccgttggacaaaaatgaatattcatccgataaaccggttgatatggattaaaatatagtgtatttggcctccaattgttgaaaggttcgtccattccacttttatcgccaaacacagagttgcgatcgttcgaaccggcaccgcaaagtgtatgaggcacaattttttgtttaattaaatcaaaatcgtcaaaattaggaccggccacagccgcgtattccatatattgttgaaacatgtattgagctgtagaagcggccgccccggactctaaatcgagagctcgatatttataatagactgatttgtaagccttacggcacgctggatcgggaatgttgtcgccgttgttgggccaataaaagttcccgtccataaaacatttatattgacgagccgtcggaacggacaagtaaccgtgcgagcgcactgctggcgcgtggattgaagcgaataatgcaattattaacgtaatcattatgatgtataataaaacgacataatacttatatttattatttattttttcattttgtacagacaaaatttatacgtgttgttagcacattgaatgtcattttcgctgtctgaatcatcgtcgtcgttgtcatcattttcatcgccatcatcgtcgtcgtcacgtttgcgtttgacaccgcattttttttgattaatttttaccaataccgcttctttctgatcgtacaattgattctgcatgtactttttaatgatggaggtaaaacactttgcaattttatccttttgttcgtcaccaaatatttctagcaattcgttcataaaagtgcacaaaatgcccatgtgttttatccaactgattcgcattttcgctggatcaaatagacgcaaagggtacgctttttctgtcactttaccttcaatgtctatcaaaagatacgggatacgatcgccgttaccgggcacaaaatccgtgcccttgttaaccaaaatctctctacaatgccgagccactgtaatcacacgtcttttgggcggcgatgggccttcgttatcttcggatgatttgcgatttttgcccgggttgtcgttgtaggtcatactgaagctgtagtcggtcaacggttttgatttggcaaactcgtcatagtattcgtaaaaactggcttgtaaactttgcaaacatctgtccatgtccgaatgacgcaatatttgttctatcgccgttctaaacgcgattctcataaaaacgggcatatcttttttaactaaccaacctttgtatacgattttatcctcactatttatatagcaatattttttctttttcaatagtattaaaactttcattaaattttcaaatgccattttgtaaccatttgtgaatgaattattaacacgtgtctcgacatgtgcgcatatttcttttaaagtgtcggttttaggcgtttcgtcatcattaaatgtaggcaacacaaatgtagaatctgtgtcaccatacacaactttaaaagcaatgttgttcagattgaattcccgtaaaatatcagagtcgttgctcaaagattcaatcaaagaaatggctaatcgcaactgattgcgaccaactttagtgatgtaatttgcaagcactttgtaaaaaatgccataatagccgtatatgctattggcgatgcgcttcacggagttttgtttttgatcgtacaaatcgtacaaaaacgccgattcactttgattgtcgcgattctttttaaatttacacctttcgcttaacaattttaataacagtttaacaactattgcgttcgaattgtggttcaaatacacgttaccgtcttcgcataaaattaaatttgacaaacaagcacaaatggcaatcattatggtcaaatacaaagaattaaaatcaagagaaaacgcgttcttgtaaacgcccgcacgcggttttaacactttaccgcctttgtacttgacagtttgattagcgggtcccaaattgattacatttttaggtatatcttttagaggtatcaattttcttttgagatttgaaatgcccgctgcggatttgttaaattgtcccgatattattgatagatcgtttttattaaaaaaatacggatcaggctcttctttgccggtgatactgttaatgcgcgtgtttgtgatggcggcgtaaaaacacgccacgctaattaaatgtgaaatattacaaatcacatcgtctgtacataaacgatgcaatatacattgcgaatatacagaatcggccattttcaatttgacaaacaattttataggcaacatgcaatcctgcacgttatacttggcaatcacgtccagccgttgaatgttgtacattttgaccatttcggtccaaagcaaatcgatcttgttttcgcccaaatagtgttcactaatcgtgttcaattgaaagttttcaactttatgctgattagaatcgctgctgaaaaatttgtacaaatcaatgtgtatataatagttaaaataatatgtgtccactttgtttcccaacttgtttataaacagctttgtcgtcggcgtcgccgccggcaaatcgtaacgcttcaatagcatcttggttttatttaatcttttgagtatgtatggcaaatcgaatacgtctccgttaaaatccaaaattacgtcgggatttgtaatttttatcatgtcaaaaaacgatgtgatcatgtcgatttcattttgaaatatgaccacacacgtgtcatcgtcgtcggtttccggaatctcggtcggcagcttgtggtacataaaacaaaatttcgcatatccgtcatttttgtacaccacaaatcctatagacattatgcaatcaattgacggtttcgacatattgtggccgtctgaatgagtttcgatgtcgtaacacatcaaaacaggcgcgatgccgctggttaaagtcatttcgtcgaccagttcaaaatcttcatcgaaatgttgcaaatcaaacatgcgcgccgtagatccgccgacataattattttggcaacgttgcgttttcctgaatcgcatatatgcgccttccacaaacggcgtttgcatatgtactcgatttacgttgtgcaaaaatttgtccagacacgccgcgttgtccgacggcgacgctttgttcctttcgtatttgatcacgtttattttgttcaaattttccacgcctggcgccacaaaattggtgtaactgatgcatttgttgcggcaagacggaaatatgtgcttgtcgtaacattgtttgtaagaatacaaatttagttttattttaaaataaaactgcagcacttgctctttaatatttgtattgcaaaatgcaaacaggttaccttttttttcatcatagtgcaaacgaatgatacggaatgtatcggctgaagtaatactgtattctcctggttttgcatattctgcaaagagcgttttgagttcattgtaaggatatattttcatttttaaatatgcaacgatggcccaaatatggaggtacagatgtcaattcacgcactgtacacgatttgttaaacaccataaatactatgagtgctcgaatcaaaactttggagcgttatgagcatgctttgcgagagattcacaaagtcgttgtaattttaaaaccgtccgcgaacacacatagcttcgagcccgacgctctaccgactttgattatgcaatttttatcagattttgccggccgagatatgaatacgttgacgcataacatcaactacaagtatgattacaattatacacaatcgcccatgcctgcgatgcaacctccaccgcccccacaaccccccgcgccgtctcaaccgccgtattatccgtattatccgccgtatccgttttcgacacctccgcaaacacagccgtcgccagagtcgggtgtcggcggctcgcaaagtctgaatcaaatcatgttgacaaacgaggaggaatccgaactgttatctctattaaaaaacatgcaaaccaacatgagttgggaacgtgttcaaaattttgtcgaaattttagtcaaaattgtacgcgtgcacgtaataaacagcgcgaccatcgttaatgttatatcgtctataacttccgttcgaacgctgatcgattacaatttcacagaatttattaaatgtgtgtaccaaaaaacgaacatgcgctttgaactagatcagtatttgtgcactaacattgttacttttatagatttttttactagaatcttttatttgatgacacgaacaaattttcaattcaccactttcgatcaattaacccaatactctaacgaactctacacaagaattcaaacaatcatacttcaaaacgcttcgacttctctccccccgaccgtggaaactgttaatagcgatatcgtcatttcaaatttgcaagaacaattaaaaaaagaacgcgctttgaggcaacagattaccgaacaacatagaattgcaaacgaaagggcggaaattgcgcaaacgcgatacaatgacttagacataaaatacaaagaggcatttgaagacaaaagtgactttgcacaacaaaaaaatgaaaacgtgcgaaaaattaaacaactagaaagatccaacagagaacttaacgacacaattcaggaattgagggacgagaatgccgaaaggttgtctgaaatacaattgcaaaaaagcgatttggaaggatataaaaatatcaatcgtcagttaaacgaggacatccgtaaactaaaaaaagcgacatttgataaagactacatccaaaccttgaataatcaaatcgaattgctggaaaagcaattaaacgaaaaaagcaacattaacgaaaccactcagaggatcatatcgaataaagatcaagaaatttccataaaaaataaccaatatttagaattgactgatacacatcaacaaactataaatgaattaattgcaactaaaaatgaattatcaggtttatttgcagaaaatgaagaatctaaagtgcttttagaaggcacgttggcgtttattgatagtttttataaaataattatgcaaattgaaaagccagattacgtgccgccggtttctaagcttacagcacaagagagtgtatttcaaacagattatatcaaagattggttgcaaaaattgagatctagactgtcaaacgtcgacgttgccaacttgcaatcgactcatgaattgaatgatttaaaaagtcaaataatttctattgtaccccgaaatattgtaaatcgtgttttaaaagaaaactataggatgaaagttgaaaatgtcaatgcagaatttttggaaagtgttgcaattacgagcgctgttagcgctttagtacaacaatatgaacgttcagaaaaacaaaacattgaacttaaacaagagtttgaaattaaattaaacgatttacaaaaattgttagaacgaaatcaaacagactttgagtcgatgtcagagtttatatcacgagatccgtctctcaatagaaacttaaatgacgagcgatttcaaaacttaaagcaggaatatgaggaattgtctagtaaatattcggccttagaaacgattaaaattaaagaaatggaaactattgctgatcaggctgttaaatcagaaataagtaaattaaatacagaaataaatgaattaaattctttatttgttaaatataatcgtaaaactcaagatatatttgaatggaaagctaacacgctaaaattatacgaaacgttggcgcgaacagcagcagccagcgtacaaccaaacgtttaataaaattacaaaaatacatataataaaattacaaaaatacatattcattttcgtcttcgtcgaatttcagtagacccaacacgttcatgttttgatattcgccgttctcgacagtaacgtaaatagttactttgattaaattatcttccagcagcatagttagctggttgaaatcggcgcatagcttttgcaacgaatctgttttggttttcgtgttcacgtagaaaacagatttattccatttgctcgaatcgaatttattcaagtcatcgcttttgaactgcacaatgaacttgctatcgcctttatcattttcttcaaattcgtttttcaacatgtttacattgtacaaagcgacatatttgttcaatcgactaatattggtctttgtatcagtgcaactttgcaaatttaaatacgtgtcactttctttagtctcgcacaattcaatacgcgtagaattgaccatgttcaaattcatatacacgtttgatccactaaaaatttgttgacactttacattgtaaatgttgaagatttggtcttcgttgtcttttaaatatttaaacacatcgtttatgtcatcagacccttttgtcttgttttttaataaatttattagcgttttcgcattgacggaacattccacttgaaccaaattggaatcatcgttgatatttttgtacataatctcaaaaacaatcttgtacaatccactgttaattttcttgtaaataaatttatactttgctaaaatattaacggaattttcattttcaaaacatttgttagtcaaatactcgcttatgggcgttgcagtttcaattttcattttgcattctttgtattcgttaatctgaatcatttgattaaattttgtttttacaaaattcaaacttatgtcataacatttaccttcttccatatctttaaaagattgtgaatcgccgtagtattcttgaattttgttgtctgacattatgcgaaaagtataatggtactcgttatcgatgctcagcgtcattttactcatcaatttaccgctgaccgttttataattttctttaatcttcttggggctactggccatgcgttttataagcggctcgccgttactttctacagacaaagatcttttagttgccatttcgatatgtgggaatctattcgatggcaaattcttaatggcgacgaaatcgaagtgtcgcccgagcaccgttccttggcgtggagcgaattaattataaacgtagccaacaacacgccgctcgacaacacgtttagaacaatgtttaaaaaagctgattttgaaaatttcgactataacacaccaatcgtgtacaatttaaaaaccaaaactttaacaatgtacaacgagagaataagagctgctttgaacaggcccgttcgatataacaatcaaacgactaatgttaatattgcgtacgtgtttttgttatttatttgtatagttttgttgagcgtgttggtcgtcttttacgataacaacgttgtaatcaacaaaaatgttgcagaaaaaattaaataaactcaaaaacggtttaaacaagttcagcaacaagtctgtgattagtgctcgctctaaattatttgataaacatccgacgcgcaaacctagatgttggcgaaaactatcggagatcgacaaaaaatttaatgtttgtaaacacgttgatacatttttggatttatgcggtgggccgggcgagtttgccaactacaccatgtcattgaacccgctttgcaaagcgtatggcgtcacgttgacaaataatttaacgtgcgtgtacaaaccgacaatatacaaacgcaaaaattttgcaaccattacgggacccgacaagtctggcgatgtgtttgataaaaatgttatatttgaaattagcgtcaaatgcggtaacacgtgcgatttggtgctggcggacggttcggttgatgttaatggacgcgaaaacgaacaagaacgtctcaactttgatttaatcatgtgcgagacgcaaataattttaatctgcctacgcaccggcggcaattgcgttttaaaagtttttgatgcgtttcaacgcgaaacgattcaaatgttaaacaagttcattaaccattttgaaaaatgggttttatacaaaccgccttcttcccgacccgccaattcagaacgatatttaatttgtttcaacagattagtcacaccgtattgcaacgatcatgtaattgagttggaaaaacagtttaaaaaatattatgacaaacaaataaaaaacttgaacaagctattgaacctgttaaaaacatagtgtatataaaaatccagaagatttcaagtagatgttaaaaatgttcatgcagatgtttaaatgttaattaaggaattactttggaaaatgaaaaaatgaatttgatgcaatttaattttttgatactctccacagagggtaggttcaaaacgatggcaaacatgtcgttagacaatgatcacaaatttgaattggccaaaacgggattgttttctcacaacaacctgattaaatgtataggttgtcggacggtttttaaaaagatcaattccaaacaaatcaaacgacacacgtattcgaattattgcatatcatcgactaacgcgttgatgctcaatgaattgatgagaaaaaaatcatttgcaagttttaagagttgccgacgtcaatttgtatctcaatcagtggtcgttgaaatgttggctcgacgcggtttctattattttggtaaagctggtcatttgcgttgttccggatgtcatgtaatttttaactataaaaatgtggacgacgcccaacgccgacacaaacaaaattgcaagtttctcaatgtaatagaagactattgtgttattgaacaattcgacaaatttgaggaaaaaatactcgctacagatttgattcctccacggcagaacgttgaaccttcggcgcccgccgccgaaccgctaaatcaacaggtttctgaatgcaaaatttgcttcgatagagaaaaatctgtatgttttatgccgtgtcgtcatttggccgtgtgtgcggaatgttcgcgtcggtgcaagcgatgttgtgtgtgtaacgcaaaaattatgcagcgcatcgaaacgctacctcagtgaatgttgcaaatgaccatgacgtttcttaaaataagctatttataaatattgtgttgtatgacaaaaaaattattaacttactgcaaattaaaaattgtgaaaggcttttcaaaaataattgtgagtttattttgtcgctgcgtcggaaaagacgacgacagtgacggtgatcggtattatcaatataataacaattgtaatttcgtttatataaatgttgtaaaataaaaaataacaattattgtacataatgttttattgtaatcaaattaatacaccaatttaaacatatgctgattttattttgaataattttcaagtggctcgtttcatccaacactattgcgttgttttcgattagttttttcgttagcatttcatctaaataatcaaactgcttgcccggaacgtttagggtttctatgctgtaattgggcgtatcactgtttagatactggttcacttcgcgcataatgtccaacacattattctgcaaatatataagctttgtcaccgcttccgcggaagtgttcatgtttcttttttataaattaaattgcaacaattgtacgtgtccactatacaattcggcttaatatactcgtcgacgcaatcgtgtttgcaatacaattgcgtgttcaacaaatttgtaacaatgtctttgaatgtgcacgtttttatgtcacccaacgcaacttttaattcattttgtagagtttttaaaatttcgtctttattgttgtcgaattcatgcgtgttgcgttccaaccacaatttgaacggctcgtctacaaagatgccacgcaacagttcatacaactgtcttcccaacgagtacacttgatcgtactctttcatgctgacctctttgctaacgtacattactaaaaaatctacaagtattttcaaacatttgtaataggcaacatattgcgatttaagttttaaaccatccaccgtgtattcgtgcgcgcttgaatcgaccactttttgattaatatcacagcttgctgtcggcgcgtcgacatgtttatcggattcaatgtttaatgtttcaaaatgtttaataatattcataaaatcatctttctgctttgatgtcgtcaatggtaaatctatcgaggtggcgacgtctgtgcgctcctcttcgggcgcgccatgcaaacgcaacgtaatttttttggaatcgttttcatcgggcatcaaatctgctgttactttattggaattcagcaacgacataatcgtagctgcttgtaaatttaataaattaattaaagaattaaattgtatatcgcacaaatttattttcatttttattgatcttactattagatgccggtaattggtatgcttaatattagtatgccggtaattggtacgcttcgtccatttttgtgactagaaagtttgctaaaaaactgagttcgtcctgtgttaaaacgttgtcgtccacaaacctatgcaatatgaacgttacactgacattgtttaacaatgaatgtatcaaaaagtcgacttgtcgcctattaagtttacctgaagagtcgaccgtttctacaagtttatagattttgttattttcaatttctttgttcaaaaacatgctaactacttgtttgagttttaacgagaaatccttgtccggataaacttgttcgcacagccaactactaagagcggttttgaccacagacaccttggtggtgaacgttgtcgatttaacaagttcggtaaaaaaatttttcattaaattggacattttaacttgcgcttatcaatcaattgagctggtatttttgtttagaatcgcgtcaagcgcttgctcaatttccaatttttttcggacgctcttagctttatggctcggtatattgtccacgtcggactctgtgttcttacttataatggccggactgacgataataaacacgagtagcaatattagtagatatagaaaaatgctgttttcctttttgtcgtataccaaactaaatatggccaatgcacccagcaacagatacaaattcatttttattcccttactttattcgttgcgataatataacaacgattctcccgacgaaccggacgagttgcgattatgccgcgtgtcgtcttcgctattgttgttgttggtgtcgttttcgtcttcactactcgtttcgtctaaacctatattgtatttgttcaaataatgtttggtgcttgcggaagattcgtggttcattaatttggccactttttgtataggcataccactattgtacaggttgctactcaaatagtgtcttatcatgttgctgcgcggccgttccatctctacgcccgactcttcgagaagtcgtctgaaatctttgaaaggcgtagaggtgtttttagatatttgcaaaatggttgggtttcgtgaataaatctcgcgtgccagttccaatggtttcattttgatactattgagcgtattattgcgactgcgtttgcgctttaaattaatcgtgtcactgtgcagttttcctcttttaatcaatacattgagatcgtttacgctgagctggcgcgcctcgttaattctcatacccgttcccaacatgatacaaaacactattgcgcccctaattagtccgcgatcgtgaacataatcactgttgagcattttaattttatcactaataaaatttaatatggtatctattacgtttttaagcatcaaattcttctctttttctctgatattttttagctccttgtcgcgcggcagcataaccatgcggggaattttgtactcgggcaaatttatcatattggtgtaaaagtttatggtcaactgcaatgtttctttagtgaccgaacgaagttcgagcatgcgccggcacagttcttgaggatcgatgagaagtgtttggctttctatcgagtcaaactctttgtccaacgagtacgacatatcttccaaataaacgtcgtctaccgagcaataaacaattttaatgaatcgagacttgtaacttttcaaagtggtgggcgcaaacggtttgggaaacatatacttgctccacagactgttgtttttcacctcgtcgggcgtgcatcgttgccggtcggtggccaaatcgaatacagcctcgaaccggggggcggattgaatttttattttccaagagttaaaattgttttcgttgcgaacattaaaaccgttcattgtggattaatcgaatttattaaaaacaaaaggagaattggtatcaatattatccaaatattgttgttgttctcttaatattacaaaataatatattacatacagcagtaaaaataaagctacaaaagcgactacactaatcaaaattataattcctgccgacatgttgctcgttgcgttgtcgtatcccatcatgtcgtttttaggcggctcgttaaattgttgcggctcgttggcggtctcgtcgtcgttgagagccaatttcaacgggatgtattccaccttttcgtggctgcccaaacgatagtagggtacgtccaaattcatgtttacagcttatttgctaacaaaaatttatgcaacaaaaatggttgggctttgatgagacgtaatttgaaatacttgctgcatttacgcttaagattgtattccatgcgggcagcagtcttgtagtcatacgcgctcgcgctgtgatacacgagccgtaaatcttttgcgttgcgcaaacacttggcaccttgtttgttcgaatgctgctttatacgcctgttaagatcgctcgtaatgcccgtgtataattttccattgtcttgcctcaaaatgtatacgcaccacactttgttggtgtacaaagtagtcgtcataattatacaatgccacctttcgtgatcggccgagtaatgttaggcgtagacgcggcaataatcgcgttggcgtccttgttgtaatttatttgttgaaaaatgaaacgtcttagagtttcgttttgaaacgccaattcggtcagactttcttgacaagcgcttttggtcaaatgagcggccggcgaattgaccgcgttggcggctgacgttaaaaaggtagcgttttggaacatgctgggctgcttgccggctcgtgtcgccaactcggccatgtaattgaatatgttggccgttgctgatagcggtgccaaaaacgcaacgttttcttttagactcatgactcgcgctctatttttttcgttcaacacgtaatggtagtagtcgccgccgccggcaaacagatcgtctatcacggcgttaatcagatcgttgatcatgttgatgtgcggaaaacgacgcgactcgactgcgctttgtatgtttggcggcagagtggcgtgcttgagcaacagagtcatgtaattgttggccaactgctgattgaacggaagcggaatgggaatgttgcatgtcaccgattccgcaaccatgtactgaacggccatgctgacttgtttggcggcctcggccaaagcgtcttttcccaacatatcggcgccaccgttgtaaaacttttgcgcgtacgccggcaacgaatttagcacaaacgatggctgaaatatgtttgagtcgctcgacagagattcggacgcattgatttgtcccaactctttttgcaatcgaatcaggtgacgtatcatggtttcctccgactcaaaccgctttaccacatttacgctgattgggtttgtgtcaatgcacatgtcgcgtatggtgtttataaaaagaatcatgagaggactaagttccgacatgtcattgcatctgtaatatctaataattttttgaacaaaatccacacatttgttgtaccaaatagattcgccggcatcgagtgtcggttcttttcttttgttgaacagcgttgccgacgagtttgcgatgttgctgcggctcgtgtaatccatactgttgtcacgcgtgtttacaacggtcgtgggcaccgtcgccggcggcacgtacccagacgtgttgtaagtttgtgcgctggtaaatatggccgttgccggattagagggaggcggacgggtattgtaataaaaattaccacgttcatctgtcatactttttatttgcactcttatgattacaaaactcaatagacggattacttataatataattgttgtgacaaaacagcgatatcaaaattaacagaattatcagcaagttaatcatggaaaatttttcaacattgaatatcaacaacaaaatggcacaggttaaaagcaccgtttgaaaactgatgcgacgacacaagatgctttcgcaatttttaaacgccacattaaacgaattttcacctttaatataattacgcaattcttttttacaacattcatcgcacagaattaacaccttcataattagcccatcggtgtgtatcgtttgaaatgtacgcggttgactgcctggatgaaattcaaacgagtacccagtggacacttgtatctctgcaaaataatgggccagcatcgaagcgcccgtttttttaacctttactttggatattttaataacattaatattgttgttttcaaagcttttgtttgcgtgatcgtcgtacaaataatgaatcagcaattcactatcatatttaactttgttcagcgttgtcaagtttttgtttcttagccgctggaacgtttccgtcatagacatcttcttccaaatcgagtccagaaacgacgtcgtttcctttttgctcatcgacagcggcggttccgtcgtcgtcattttcggtttctacaatgcttttgggtgacgatgcgtctacaacaacgtccgtcttactattatcagattgccaaatttttgtttgaaataacaactgattcttgtttaactttatttcggcacagttaaacattattgcattaagatcatactcgccgttttgtaccaaattgcacaaaataccatagttaccgcacgacactgtagagtaagcgtttttgtacaacaatccgagttgcggcgagctagccaccttgataacatgcgcgccgacgccccgtttttttaagtaatattcgtcttcgattataaaatctagtacgttttcatcgtcatcattaatttgagcgtttacgatgatgtctggcgtggtgttggtcatgctcgtcatttttcttataatagcgtttactttaatgtacttagcgatttattttgaatttgacgaaacgactttcaccaagcggctccaagtgttgactgaatatgtaaagcgcaccaacgcatacgaacccacacctgacgtaataggctacgtgtcggatattatgcaaaacacttatattgtgacgtggtttaaaaccgtcgacatgtccgactatcacaacagcgtgcacgatgatcagattgaaacttttgatttcttagatcaaaagttcaaacccgttgatagaattgtacacgatcgtgttagaacaaatgatgaaaatcccaacgagtttattttagccggtgacgatgccgacgtgactatgaaatgtcccccatattttaattttgattatgcacaactgaaatgcgttcccgtgctgccgtgcgacaacaagtctgcaggtctctatcccatgaacgaacgtttgatcgacacattaatgttgaaccaacacttggacaaagattattctagcaattcgcatctgtatcatcccacgttctatctgagatgttttgcaaacggagcacacgtggttgaagaatgcccagataattacacgtttgacgcggaaaccggccagtgtaaagttaacgaattgtgtaaaaacaggccggacggctatatactctcatattttccttctgatttgctcgttaaccaatttatgcagtgtgtcaatggacgtcacgtcgtaggcgaatgttccgcgaataaaatatttgaccgcaatctaatgtcgtgcgtggaggcacatccgtgcgcgtttaacggcgagggacacacgtacattacggccgacattggcgacactcagtatttcaaatgtttaaacaataacgaatcacagctaattacatgcatcaaccgggtcagagactctgataaccaatacaaatgctccggcgactccagatgtatcaatttaccaaacggtacaggccaacatgtatttaaacatgtcgatgaaaacgtttcgtacaacataggccaattggtgtgtgataattttgaagttatttccgatatcaaatgcgattcatcgaacgtgtttgacaacaagttatttatgaataaatttagattaaatatagaattcccaactgaggtatttgaaaataacgcgtgcgtaccatccaccgtggataacgtcaactttttgagttccacgtttgacatcgaaaatattccaaatcattatggcatcaacatgcaaacctccatgttgggtatgacggaaatgattaaacatttgatttccggagatctatcgtctggcgaagacgaagtttttgctcaatggcttttatatgcaaaagacaaagacgccatcggacttaatccgttcacgggtgaacctatcgattgttttggaaacaatttgtatgacgtgttcgatgcaaaacgtgcaaatatttgtgacgattcaggaacgagcgttttaaaaacgctcaattttggcgatggcgagtttttaaacgtactcagcgacacattgaccggaaaagatgaggattatcttcaatattgcgctctttcctacgaaaatggccaaaaaatcgtaaaaagcgaacattttaagaggcgtatattaacaaatatactacagtcggacgtttgtgccaacatatatactacactgtaccaaaaatatactacacttgcttcaaaatatactacaactccgtttcaatataacgacactttcgtaaaacggtctaaaaatatggaagtatatgaggtaaatacacgttttaaaaacgctacgattttgaaaaacgctactgatattccgcctctatttaatccctttcaaaaccagccaaaaaacaagcaaaatgattctattctacctctgtttaacccttttcaaacgaccgacgtcgtatggtacagcgaaccaggcggtgaagacgatcattggatagtgccgccgcccgtagaatcgacgcctacacctgaaccttcaccttcacctgaacccggtccgccttcaccccctccactaatattagaagacaaagatttattttattcatgtcattactcggttccgttttttaagatgacaagttgtcatgcaaaaaatgacgtcattgttgatgctctaaacgagttacgtaacaatgttcaagtggacatggattgtgaatcggccaaaaacttatcgcacgttttaaacgcttacgcgtatgtaggcgatgggatcggttgtagatccgcgtacgatggaaacgcaatagtggtaaaaaaagagactgcgcctagtcacgtgtactccaacctaaacacgcaatctaacgacggtgtcaaatacaatcgttggttacacgtcaaaaacggccaatatatggcatgtcccgaagaattgtacgataacaacgaatttaaatgcaacgtagaaatggataaattatattatttaaataatttacaagaagatcacattgtataatatccgccgaaatcgtgtatgttttacgagtagaatcgtactcgtaaagcgagttcagaaaaacaaatgacatcatttcttgattatgttttacgagtagaatcgtactcgtaaagccagttcagtttagaaaaacagatgacatcatttcttgattatgttttacgagtagaatcgtactcgtaaagttagttcagccgagttcagaaaacaaattagtcatcccatgattatgttttacgagtagaatcgtactcgtaaagcgagttcagacgagttcagaaaaacaaatgacatcatttcttgattatgttttacgagtagaatcgtactcgtaaagccagttcagtttagaaaaacagatgacatcatttcttgattatgttttacgagtagaatcgtactcgtaaagttagttcaggaaaaagcgagttcaaaaaaacaaatgacatcatcccattaaatgacgaaaaacaaattagtcatcccatgattatgttttacgagtagaatcgtactcgtaaagcgagtacagttcaaaaaaaaaaaaaaaaaaaaaaacaaatgatatcatatgttatgcaacgtcagttcagctgagttcagaaaaacaaatgagtcattcccatgattatgttttacgagtagaatcgtactagtaaagcgagttcagttcagaaaaacaaatgattcattatttcacttcaccagaaaaacaaatgagtcattcccatgattatgttttacgagtagaatcgtactcgtaaagccagttcaattcagaaaaacaaatgagtcacagatgacatcattttttgattatgttttacgagtagaattgtactcgtaaagccagttcgatttagaaaacaaatgagtcatcccatgattatgttttacgagtagaatcgtactagtaaagcgagttcagttcagaaaaacaaatgacatcatttattgactcatttatgattaagcgagttcaacagagttcagaaaaacaaatgagtcatcccatgattatgttttacgagtagaatcgtactcgtaaagcgagttcagttaagaaaaaggttatgagttttggaaacaaaacaaaataaacaagggaatattatagaattatatttattaatttattgtaacatttgtgacatatttttaatgttatattcgttttgtaataaatgtttattatttagcttggctttttacattgtattgcgatttgacaattatgcgttcgtttcacctacaacattaggcacaataaccgccgctgcaccttctccgccgcccaaggtagcgttcggattcgctctaagtaaaaagtcgtttcgcaaaaagttgttttctgaattgattatttggtaccccaaaaatagcggtacgtaagtagggtattcttcgtaaccgcttagcgtcctgtccagctcgcgtgtgtcaccttcaaattttagaacgtttctaatttgcaagcgattaggttggcttctcatgacgtcactgcttcttatcgggttatacaattcggtgccgttgggcacagacgccactagccccgtatcgttgattacacacgtagcgcaatttctaaacctcaattcctccgtatcaatctgcaagtactccggtgctactgcgcgtcgaattaaattttgcaaaaatccgctgtaattgttaaaaaattgatcgccaacgccgcctcgtcccgctcgagcgtttgccacgtcaaagaaacgcaactcatcacgcgacaccctcgaacaaaacgtgtttgggtttgtggtgtcgagaatgttttttgtagttgaataaacgctgtgtatgatgcgctgcgtgttcattgtgaaaccttcgttatattttagattgtcgcatatagtgttaactgcgctttcgttgttataaatcaaatgaaagattagctgttcagcttgcatcatactgtttagattaaacacttcttgataattgttcgcgctcggaattaaaattcgcttgacgcctctctctttatttccaactaaatgcctggcgatcgtcattttaaattggttgtcgtcctcgtcaaaaattggcaaaaccatttttgacattttaaaacgttttatgaggtggttgttgcaaataaaccatccgtcgtcgttatacgcgtcgggcgaacacggcgatttgtacgttatacacgcgtcgaacgacacgatggacgcgaaaatgcatcgattgagtttcatttgtctcggcgccatacccacgggcactagcgccatattgttgccgttataattatggattacggcgattttgtgattgagaaagaaatctcttattcaataaattttagccaggatttgttgtataaaattttaaattcttatattgttcctaattattcgctgaaacaacaatattttgatttgtacgacgaaaacggatttcgaactcgtatatttattcaaaactcttgcaataacataatatcaagcgtaaaaaagactaattccaaacacgaaaaatttgtttattggcttaaaaacaccaatacattggtgcctttggtgtggagagaaagcaaagaaattaaactgtcttacaacagtctttcgcagactttaaccaaattaattaaagtttacgtttatcaacacgaaaaaattgaaattaaatttgaacatgtatatttttcgaaaagtgacatcgatctatttgattccacgatggcaaacaagatatccaaacttttgactttgttggaaaacggagacctttcagacacgttgcaaaattcgcaagtgggaagcgatgaaattttggcgcgcatgcgtctcgaatatgaatttgacggcgacacgcccgacgacgcgcagctaaacgtgatgtgtaatataattgcagacatggaatcgttaaccgacgctcaaaacatatcaccgtccgtaccactaaccacgttgctcgacaagatggtacctcgaaaatttgaacgggaacaaaaaatagtgtacggcgatgacgcgttcgacaactcgtccgtaaaaaaatgggcgctcaaattggacggcatgcggggcagaggtttgtttatgcgcaatttttgcatcattcaaactgacgacatgcaattctacaaaaccaaaatggccaatgtgtttgcactaaacaacatcgtggcctttcaatgtgaagttatggacaaacacaagatttacgttacagatttattgcaggtgtttaaatacaaatacaacaatcgaacacaatacgagtgcggtgtaaactcgtcgtacgctataaacccggtgacggccatcgaatgtataaactacatgaacgataacatacaaaacgtcgtgttgaccgacacctgtccccagattgaattgagatttcagcaattcttcgatccgcctctgcagcaaagtaattacatgaccgtgtctgtcgacggatttatcgtgctcgattctgcgttgcgatacgttaaatataaatggatgccgacaaccgagttagagtacgacgccgtgaacagaacgttcaatactctcgacaagccattgaacggttttattattttaaccgatttgccgacgttgttacacgaaaacatttacgaatgtgtgattacagacacgacaataaatgtgttgaaacaccgtcgagaccgaattattccaaattgaagtgctttgagatctaaaataaattaaatatcaaaaagatgttgtattattgcaaatttaacaattttttgtattctccccatgtcatgcgttcgaaatgagctggcggttttttatttctttgtatccacttgtaatcgttaatgtgattgtgaaaagtcatgctaacgtgggccattaaatttttcatgagtacattattcgacaagtctgcgcccgtcgtttcctgctggtatgaatcgacaaacgtgatatctataccgtatttttctttgtcgagtgcaatttctattaactcgatgtggtaaatgataaaccctttgacgttcatataatggtcgcgacacatggcacactgtagtataaaaaatacattgtaaaatagaaccttcatcgttttcaactgttgcatgacaaaatctaaactgctcttgtctcgcgtatacaccatgtcgtcgatgatgagactgagaaaatgtatggtgtcccatattgtggtaaacgtgtaagtaaaactcttgggctgacatgaacgtaaattaagttctgtggttttgtcaataaattctatgcgaaactgttgcaagtccatgtcgggggacgcgttaatcgcccattcaatcaattgttgcacctcgtacttctgaatgtctttatacttcattaaacacgcaaaatgatataagtaagctgcttgcgaagacaacagtttggttaggtgcgccgatttagaggctcgcaaaagatctatcagacgaaacgaatataaaagatagctgtctttgtagcgagaaaaaagcggcgtcaacggtatcatggcggcgattggtaaaacaatagttttatacttatgtcaagcgccgactacggtgtcgttgcacgtcagcggggacacggacgaagacgagcctattatttattttgaaaatattacagagtgtcttacggacgaccaatgcgacaagtttacttactttgctgaactcaaacaggagcaagccttatttatgaaaaaagtatttaaacatctgatgcttaaaaacgagggcgcctttaacaaacaccacgtattgtttgatgcgatgattatgtataagacgtatgtacaattggttgacgaatctgcgtttggaagcaacgttattaactattgcgaacagtttatcacggccatttttgaaatttttacgctcagcagcaaaatcattgtggccgtgccagtcaattgggaaaacgataatttaagtgtacttttgaaacatttgcacaacctaaatctcattggaattgaaattgtatattaaaacaatcatgtggacactcgtgttagttgttattctgctcattgcattttatctctattggatgggtaaattgaatctcaattccataaccgagtcgtcgcctagtttagcgcagagcagcgattcgttgcaattagacgaggccaccaaacaactaaatctaaaattgaataatggccgagtagctaacttgcgcattgcacacggtgataacaaattaagtcaagtgtacattgccgaaaaaccgctatctatagacgatatagtcaaagagggatccaacaaagtgggcgctaacggaatctttctaggcactgtatacgattatggaattaaatcgccgaacgtggccagcacatctagtaatgtaaccatgacgcgcaccacctcaaactttgacatcaaggaatttaaatccatgtttatcgtattcaagggcgtgacgcccactaaaactgtagaagataacggtatgttgcgcttcgaagtcgacaacatgattgtgtgtttgatcgatcctaacatagcgccgctgtccgaacgtgaagtgcgcgaattgcgtaaatctaactgcacgctggtgtacactagaaacacggcagctcagcaagttttgttagaaaataactttattatcattaacgctgaacaaactgcttatctcaaaaattacaaatcgtacagagaaatgaattaataaaacaaatattattttatattttatattttatttattaacatacaaaatttggtacattggtgtttaaatcgtttctgttcaaagccatgctcatgttataaaacacttttgtattttcgttgtaattatttttaaaaaccttttttaattgttgtaataaaaattgttcattaaattcaaaacactttgaactgcttgcgtttacattcttgtttatattctttttgtaattatactgaacaaacgaaggatgcaaaaagtttttcaaatgattctgcacggcaatatctatcatctcctccattttatcctctcctattgtaacagtggtattgcgggtcgttttaatgtttaaaatgtaaacgagcgcgtacaacggactattgttgatgcttaagcacatcaagttgtgtttatgcatggggtcgttgtttagcagcgttttgtatatcacaaatcccgttttggggtcgcgtctgtacatcagtacgtgcgataagaacagacgcaccggcgttacaagcgactcataatacaaactttctatcggaaaccgttcggacttgatgtgttcgtacacggagccggcaaacttgactccgtcaacaaacttatgatttgtgtaaacgatcaaaaatctatcttgaacaccgtcgtcataatcgtccacgtatagcggcttgttgttaacaattaacattttgtagttcgcttcgtactttagcaacccttggtattttctgcttttggaatcgctcttgctagagtcggcgtgcttcttgaagtatgattcgctacattgtttcaactcgttgatggtgtacaactgtgagttgagtttgctgacttctttgtcactcgtttctttgttggactctccactgtggttgtcgtcgtcaaatttgtgcattaacaccaaatagtccaacaactcaaaaaacgacgacttgcccgaacccggcgcgcctggcatataaacagctttctttccgtaatcgacgggaatggccaaactagcggcgaaatgcatcaacatattagcattcgcgtgattaaaattggtgaagcgtttaaaatacaaatagccttcgacaatctttttcaaataattgtacgagtattctttcaagtccaatttggacatgatgatgcgcatgtagaaccgagtcagccaagtgggcagatcgtccgtactgcgcgctaatatgattttatcccaccatacattgtattttttcaagatctttaacgtgtcggcgtgatgagtgtaaaatttggaaacgctatccgattcttcaaactgaacatcgggttcgcgtgcaacatcatcgcgcaattcggtcaaaaacaagcgtttatcattaaatttgcccatcaaaacgtccacatactcgattttgtgaattgttcgatataaatactgaatgattctgttgtgttctttgaaaaaaaattcgccgtgttgattaacaaaatcgctgttcgtgcgaattaacgcggtcgacacgtatgtcctgttgttaaaaattaacatccaaatcaattcgctcaattctgtatcgtttccaaataaatctgccatcaggcaaacttttaaagcttttctgttaatttttatttttttgtaacatttgcactttggtcgagatcccgatacggtcgaccggcacggtttgcattttaggttgtgcaacatgtccaaaactctgttcttgttcacatacagagcgagcgtaatcaaattttcatcgtccaaattccacaaatctcgaaacatgttgttcaacgcgattctcatatcagcttgacacgtgttacaattacccatatagttaactatggccatgttagtttttaacatttttacatctctgcacattttggcgatgtgatagatcctataaatgttgagctcgtcaacactggtagatagcatgtagttaaacgcgtcatcggacaaatatttttcgtcggtgggctttttaaacgtttgcggcaacgtggtgcctagtaaaaatgggcagctcgaatgaaagctgttggtaaacacgttgtagacaccgtgcgttgtaaggtacaaatatttccaattgttaaattttatgttgctcaacctgtaacaattacttttggtcaatttgaacaagtcatcctccttttttacaatttgatagtgtttgccgttgaaaaccaaattgactccggtcactacgttttccaattttctaaaaaatcctttacacacaatatcagaagacaattttaacgccatcacattctcgtacgtgtacgcccataattcatcaaaatctgaagtttcgtttttggctgattgagtcagatatatcataaagtgtataccaaaataatagcccaatgacacagacaatttgttatcttcaaagtcgaaccaatgattgcaagccctgttaaacactattctgtcttgttttttatatggctcgcatcgttttagagcttcgtttagagcttctttgtcgcagtcaaatagcgattcacataaaagttccaaaaacaatttgatgtcggtttctttgtacgaatgattttcgtttttaattaacattttccacaacacgtagattaaataatcaaaatttttaaatttgctttttacaaaatattgttgtagtaggtttggatcgttggcgcgttcgtgggcggccaaaactttaaccatgttctcgtgaatttctgtaagccccaaattgatttgtgcttgaatgtaatcggcattttcgctgcttgccgatacaatgggtacgatacgcggttttttggaacgagtttcgatcaagtccacgtcgtttttgtcgaaattgttattctcaaacactctgagacttttgaggttgacgttaacaatatgcttgaacttgggagccgtgatgcattcctccaaattaatgtcgtcccgaatgtaattgaaaaaatttttgtccgaattgaccagctcgccatttactttgcacgtggccacagtgccgtcggccattttgagcataaacaaattttcgtgagaatcatcaaacttggtttttccatttacaaacaacgtttgcggcggatcgtgattcgtgcgcagactgagctcgacgttgagaaaatatttgggatcaaacacaaacaaatccacgggtcctaggctcttgttgtgcatgattggtatcgtgggttcgatgacgattccaaattttatattcaaaaatagctgccatccgttgaaagaaaaggcttgatctttgggccaattgggccaataataataatcacccgcttgcacgcatttgttaatgtatccacggtcggtgctcttgaaaaaatcttcaaagttaatatacttttgtatcatgtcatagtatttttttaaaatgaagggttttacaaaaatgcaaaaatcgttgctttccaaaacccaatcgtggtcttctatagtttctgtttgtttctctgcacattcttcgctgtcttcgctagcgttcatatcgtgctttgcgcacggaccgttgaaattgtttctgattgtgtttaagaactgttgaaagttgtcgacgtactcgaataatctacgtgttcccgttcgcgtgtttctgatgattaaatgatttgcatcttgcaagttgttaatctcgtatgttttgtcttgaggcacgttcttcaaaaaaaattgtaatatgtcgtcaatcatgttgattatccttttcgtactcttcgtgttaatttatttaatagtttcgatcaaaaatcaccatccattcttacatagaatagagacgctaatacaagatttcaacaacacattgttgtttggtgcgtatattaaaatttacgatttaagcacgtccgcgcacactgaacgtttgtttattattgcacccgaaaatgtggtgttgtataattttaacaaaacactctattattatcttgattcgtcaaacgtgttttgtcccaacgagtttagcgtgacaacatttacacaatctactattaaaacgatcaacgaaacaggaatatacgccaccgcatgcacgccggtcagcagtctgacgctaattgaacattttacaacattaaaaaataacgtgcccgattacacgctcgtgttggacgcggccgagcagattcagttcacgatcgtggacattatcaatttcctcatttacaacggttacgtggatttaaaagagcttgcagaagcctaacaggcagtagcaagccgaggcttaaacaggcaagtcgaggctaaacaggcaatagcagtagcgacaatggaaaaccatccaattatgggaaaactgggaaaacatcagagggacattctgatggctacgataatacatcgagacgaggacgacatgtttttaaagaagattcaggagtcgaatcccgtcgagttggccgagtggcggcgtttggaaaaaatgggtatacatgggatggtggcgggaggatttgctgcgtacaccatgggtttgacgacctgttactcggacgttgacttttacaccagattctgcgaggtttcgttgaaaaccttaatcgaaagcggggattatgaacacaattatgtgtgcatatgtggtaggtcctatgtaataaatcataaatattccaaaatacaaattatatttatgcaaaaaggagaatccaaagccaacgacgatctatcgttttactacgaaatattgaaaagttttgatatggttttgtgcagcaaagggtttattctggaagaagccggaaatcataccgagcgtttaaagtatataaacgtcaattatgattccgaacgaccatcatttaagcgcgcaataaaataccaaaatcgatttaaacattttggcgtgccatcgactctgcaagaattgtgtcaatctaaaattctaaaactcgatcccaattacaaaaaactatattttataataccacattattgtggatgataaaattgtaataaaaaaattaatttattctagttttttatttgaagcgtacaaattgtcatattctgtgacgttgtagagtatttcgtcatgatagcggtgccagtcgtgcacgggcacgggacagcgttttacgcgcacgtagtagtcgtacgcgaagttgttactcggaaggtcgtcgaccagtgtgatagatttgaaaaaatttacatttttatcgctcaaatatttaattacaatttttggcgatttgggtatattgttgtctgatatgtcgaaaataaatttattttcgataaaacgcttttttaaattgtaatctacaatagcgttgtgtgaatttttaactaaatctgagcgctcttctttaacgttggaaccttcgctgataataatatcaaaatatccttctaaatctgcgtctttcatcgagtgtactacatgatctctactgccatacgaccacaacactaaaacgcaacccatgtcgtgcaactcctgcaagctatcatacacaaatggatctctgatctgaatctgttcctcttcggttatgagagtgctgtccaaatcaaacacgactacgtgaggaaatccccacgttaaagattcacttttgagagagaccactttgtagtgtggcaatagaaaccactctttaagaaacgaatacattggcggtttgttgctaagtatgcacatgtggcccaacacggacgttttgaatgcatgtttaatattgtgtctaatgtcgcgcatgtcgtcggctggcgctttaaatatttgcatagaataattgtaattattttctataattttgcacagttgtgggtcgttgcaaaattgaaatattacatattcaaaaaatttatacttttcaaacccaaggtatttgaggtcggcgtattcgcttaagacgagaacatgccttttgatgatggcgtcgttaagacgcaaacagatccatttgctttgaagcgaggaggccataatgtaaaaaaatggaccagttattccttatttaaaatatttaaagagtttcgtgtaaacaaaaactattctaaactaatagatttcttgacagaaaattttcccagtaacgtcaaaaacaaaacgtttaacttttcgtctactggtcatctgtttcactcgttgcacgcatacgtgcccagtgttagtgatttggtgaaagagcgcaaacagattcgcttgcagactgaatatttgacaaagctattcaacaacacaataaacgattttaaattgtacaccgaattgtacgagtttatcgaacgcaccgaaaacgtcgattgctgctgtccgtgtcaattgttgcacaaaagtctactcaatacgaaaaattacgtggaaaatttaaattgcaaactatttgacataaagcctcccaaatttaaaaaggaacctttcgacaacattctttacaagtattccctaaattacaaaagtttgttgttgaaaaaaaaggaaaaacacactagcaatagttgtgtacgcaaaaagaaaatcaaacataggcaaatattgaacgataaggttatttatttacaaaacagtaataaaaataaactatttgagcttagcgggctcagtttaaaatcttgcagacacgattttgcaacagtcgaaagtcaaacgagggcaggcgacgaaattgcttcgtttattcgctactgtcggctatgtggaatgtcaggttgttaatagtagcgcgttctgtaacttcggcggcctgtcgacgaacggcttctggatcttctgtatgtacgaggtctgcccggacggcgtctgtagccagaacttctacgcctgcgtgttgagccatatgtggtaccggtcgaagagcggcgacggcgacgataaaccatttttgtaatttatgtaactgtaatttttaccttattaatattttttacgctttgcattcgacgatgattgaattcccaaatatatgttcaaatcgtcttggtcgtttgattttgtgctgttgtgtttcctaatattttccatcactttaaatatgttattgtaatcctcaatgttaaacttacaattagacacggcatagttttccatagtcgtgtaaaacatagtattggccgcattgaaatacatacgatttatcggatacggatctatgtgtttaagcagtctgttcaaaaactctgcatcgtcgcaaaagggaatttcggtgccgctgtttatgaattgctgcggttgtaacatttgtatcttttcgccgcgctcgatcaacaactcttcgagagtggtacgtttgtctctctgtaaagccgtgttttgcaatagcactattttagcgtacctcataatcggactgttgaaacagcgtgcaaacgacgaccgcataatatcgacagtcgtcaaatcgactgtggtcgaaggcatttccaacagagatctcactgcgtccaacaacgtgtcagtttgtatttgcgtcatttgaggtctgcatgtgtaatcgtcaaacgtgctttccaacagtttaaacaaggtatgatacttttccgatcgcaacaaaaatatcatggtcattaccacgtcgctgattttgtattcggtcgaattagtgctgttcaacgagtaatgatggatgagcttgcgagcagcatttctatatcgacgcatgttgatcaactcttcggactgcgcgggcgcagtggtggcattggctcgcgcaaacaaattgattacgggacgaggctgcgcgggtgcagacgcgtcgagggcgcccacgtttcctgccgcgtactgagacgctatggcagcgttgttgtttaaaattgtgttttgtgatttgcgagccacgtgcatcataaaatctattaaaacgtcggtgtttaattgcacgttttgatgttcgtcgcacaacaaaggaaataactgcggccatatcgccaattgcataggctcgtcaatttttaaccgaagtttatttatttccaaatacaacgcgatagcgctcatcttgaccgattacacacacttactctgtaactatcacttggatcgtgttgtcatagacacttcctaaaaagtccaacacgttgaccgtttcgattctatttagcttaattgtggacgcgttggattgcatcgattccaaaaggctgcgcgctccgacagattgagtggacaaaatttttaaactttccgtcttattgggcgtggcatcgttgattaacaaagaggcggccgtttgagatgcggcagtattgatcgtttccaacatatcgacgaccgccatctgattaggttttgctgccgacggcctattgcgacggtttctccgagcattgtccgcatcgttatcatttattgaagcaatcatggttgagatcgatcaacaaagatatttcattatctaattgatatttagtaatgatgtgccttataaatgtttcgggcacaatcatttctgtcattaacacattacaaatatctattttaatcaatttcaatttatgaattaatagattaatattttcgtcagagtacttgttcatgatgaatcggcaaacgttgcgaagctccaactctgccttcggatacgttttgttgggcaaactttctaaatagtgtctcaaatagaagccgattaatacggtggatgctattttgttgacctttttcattttagtattgcgtcccatttctatcatgaaacttttaaaaggtagcaacagcctgtctccattggaaatggtagagttgccgttgcattgcgcgctcaaaatgctcaatacacgctcgtgatcctcttggcgcaatccgataattgcttttttgcattctttaacaaatggttcgcacgcgtcgcgttttgtgtacagagaatatgctttgtcgcaaatcaaattatagaaaaattgcacaaatatttgcgtaatcaaattgttttcgttgatgatgtcactttcgtttttgtaatcggttcgaagtaacacgtacaacatcaaaggcatgccgaacatgggtcttaggaaaatgtcccaaccgttttgcaaaccctcgtcgagggtgcttaacgagcacgtcaaatatttgcatttacactcaaaacattgaattttgtttgtggacttgcacaactgacacatgatcgcatccacgtcaggtgcaggcgtcggattgtagtatttttgcaagtattgcataatggtcctgaaatggggcacctgcttgatgaattcgtcgcgcaaaaatatcgaaaaaatattttttacattgtgtatgttgtctgcattgttggcttgattttcgaaactactttttatggaaacaatacatttgttaaattccgtgaaaaaagtaagacctttactgtctacaatcaagttttgattgaaatattttgaaaataaaaaacataacgattcgatttcattttgtaacaattgcgcttcaaaacatacattttcaaagcggtcgtaaacgttgaaccttaaactatactgtaatctgtaagcgcacatgatttattcaatataaccttataatatgaacgattctaattctttgttaattacgcgtttggcagcgcaaatattgtccagaaatattcaaacagtagatgtgattgctgacgataaaacgctcagcttagaagaaaaaatagacacgttgaccagcatgatgttggctgctagtagcccaccacaatcgccggcgccgctttccaccgatatgaccgcatcgttaattaaaaataacagcaaaatgatcgccaacgattttgaaatgcgatacaacgtgttgcgtatggcggtcgtttttgttaagcgttatcccaggtattacaacgaaacgaccgccgatctagttgctgacatagaaaacgatctgttgcaatatcaaaattatgttaatcaaggcaattatcagaacatagagggttacgaaagtttattaaataaggcggaagagtcttttattgaaattgattcgcttttaaaaaaagacatcaaaaaaatcatggacgacacagaagcgttcgaaagggagcaggaggcggaaagaatgagggccgaacagattgccgcaaacgctctttcggagcgacgagtggagtccgcagatgatgtcgttaatcgtgccgacgccaatattttcacagcatttagcaatccgcttccaggctctagcgcgacgcgatacatgtacgaaagttcagagtcggatacgtatatggaaaccgcccgacgtaccgccgaacattacactgatcaggacaaagattacaacgcggcctacacttccaacgagtacaattcccttgtcaagacggttcttttgcgtttaatcgaaaaggcgctggccactttaaaaaaacggctacacattacaactattgatcaattgaaaaaatttagagatcatcttaacagcgataccgatgctggagagtttcaaatattttttaatcacgacgattgtgtgatactaaaaaatttgtcaaatttagcgtcaaagtttttcaacgttcgttgcgtggccgacacgctagagattatgttggaggcgattcgcaacaatattgaattggtgcagcctgaaagcgatcccgtacggcgaatagtcataaaaatgacgcaagaaattaaagattcgaccacgccgttgtacaacatcgccatgtacaaaagcgattatgaggcgataaaaaacgaaaacattaaaactttgtttgatttgtacaacgaaaggttgccaattaattttttagacacgttcgcgataagttctgttcgcgacaagaaatctgcggcaagcgactctttgccgactcgcagcatgaaacgagccagagcaaataacgaacaggatgttgatgaagatgacgatgatgatgatgatgacgttaaagaagttgattatgaaaaagaaagtaaacgcaggaaattagaagacgaagattttctcaaattgaaagcgttagaatttagcaaagacctagttaatgaaaggcttcaaaagattattgtggtcaccgacggtatgaaacggctgtacgaatactgtaattgtaaaaattctttagagactttaccaagcgccgccaactatggcagcttgctcaaaagattaaacatgtacaatctcgatcatatcgaaatgaatgtaaatttttacgagttattgtttccattgacactgtataatgacaatgataacaatgacaaaacgctgtctcatcaattggtaaattacatatttttggcaagtagctattttcaaaactgcgctaaaaacttcaactatatgcgcgaaacatttaactcgtttggtccgtttaaacaaatcgactttatggtcatgtttgttataaaattcaactttttatgcgacatgcgtaactttgccaaattgattgacgacctggtgcccaacagacagcccaacatgagagttcacagtgtgttgctcatgcgggataaagttgtcaaactcgcttttagtattttacaatttcataccttttcaaaaaaagacaagtcacgcaacacaaaacatttgcaaagactaataatgttgatgaatgcaaactataacattatataaaattgatttaatttaacaatacaaattttcatcttcgggcattacgggtccacgttcattcagcgcgtacatgataatgttgtggcgaatgtcggcacgttcctgcggttctggcacgtgttgtagtcggtcctgcaaatgtaacttccatttttggaaatatttagtccattcttcttgatattcaccgcgttgcatgagctctacgtacagttttaaaagtttgacattttttacaaataacgttagagtttcgtcgattttgtattcatttttgtttaaatccaatacatttgaattgttcacgatcagttgtttgtttttatttatcgtaaattttacctcatctcccacgttgaataacatgtttaaaattttggtggattttggcaaacgtttataatctaaataatattcaacgtacacataattaaacatgatctgcaacaatcctttggcagagttcaaaattttgtatctcatcaaagcataaataatttttattatcgacgccatcgttaatttggttacaaactcgtacaattgcgagtttttaaaatcttcacatttgctaaagatgcccaattcaggagattttccagttaatatgccaatcagccccttgtacaaatcgacatatttgacatcgttaccagcctcatcttttgcatgtcgattttttaaaagttctttattatcaatagacttttcaaaagtttctcgatcacatttggtgtaaatatgatagtcaatgtcgctgctttcaaccgcgtatcccttggcgcggctgcccgtatcaatgcaaatgtacaccattacgcgtgtcttatatctataatatttttacaatatttaagtgaaacaatatgacttctaacaattttgtggatgtggatacgtttgcaagacaattgattacagataaatgtagtgctctaattaaaagtgcggatttgttaccggcaaacattttagacattgtagagaaggctagagacaagtattttgaagaacccactcaaaaaaactatgaatatattaaaaaattgtttttacgaacaaaatacatggacgattcgatagattacaaagattttaatagacgcatactattgatagtttttaaatttgctttaaacaaaagttccaattactttccatcgtacaaagaaataatcgaagtggccattaaacgtttaaacaaaatcaatcccgatctaaagagctctccgcgagcaatgcttcagcattacaatgaatgtttggaaaatttagacaatccagtcacagacgaacatcatttgttaacattcggaaaagaagttgccacaaaaatatttatcgaagcgttcgaattcagttacaccaacactaacgccatcagcatggacaaaagcgatgaatttgattttattaaaacatcggcgttgacaaatactaaaccgccttcgcttttggccaacgtgatgaacgaacgtaaaagaaaattacaaaacaccgactctattttactaccagcaccgtcgacgtcacaattgcgtgaacctggaaaaaatcatttactacctttgttttcattgtaattatgctatatgtttctatttctaatatcataattttctaataaagtagtttcatatttttgtttttgttctgtaattgtttcttgatttaacaaaatcactaccaataacatgaaaaataatacaatcataataaaaattaaaaatccgcatactactaaaacaaattctttaattagcgatcggtttctatttacaaactgatcgagttgatcaccttcagtcggcgagttgttagcctggattatgtcaacaatattgttgcccgcgcgaccacccgtcgctcttgagataatatcggccggtgtcggtttcatgatgtgcttaactacaaataatagttgtaccgaacgggtgtgaccgtgacgccgctgctaaaacctccatccgttaaaacacgttgagttacaagattaatgtttgttcgattatcgtaatcggaataatcgaatgtgttgggagaattaaaatcgggcatgttgatgggtacaatgccactggaactaatagcaatgctatcgttcttgcaaaacaaacgaatttttttgtagggttctgctttattcggtaccatttggtcaaagttgttcaatttaatgatcacattgggcaccaattgatagggaaaaattattttttgaaacattttgacaaagtccaccaccgtttgactatagtcgggaatgcctagcaaagcttgtgcacgtttaacgtatttgagactggatcgatttattgtagcgcaattggatggcacgtcgcctttcatgagccggcgtgttctttcccaattcaatttgttgtacagattatcaatttcttcgtgcggcagatttattacatagcgtgctggctgtttgcgatattgaaagatgcaaaatatgcgttttaacgacaatattttcaccatggtggacgtttccagactgaaacacagcaaaaaatcattgctttccactaactctttaaaatgagacaaaggaatttcacaagcaatgggccgcaaattgctttttattggaggtggaacactttgatagttgcggttttttagtagcgtgctgcacgcagattgcatctccatttcgggatacgtaaactctatgggacatttgggattctcatggtggacgatcatagtgttacaataaaacaagttgttggtcaagagtacgctaaagacccgcgtttcgccggcaccaatttcggtgatgggcaccaaaggattccaatacactatggtagcggacgctgtttttttcggcgatcgactgtctatgttaacgtcatgctcgtgcctgtacactagcacagaattgaattttggaaattgttttttgtcaatgtacaaccgatcatcgtccgtgggcacatatacgattaaattttcaattaatttattgcctacatcgttttgcggttccactaaattgtgagggaatgcaaaaaagcggtcgctaatacaaacttgaatttgaaatgggcactccatcacgatgtgtatgtcttacttcattactttaatttgtgaacccgtaccgtattcaatatagtgtcgggcacgtaattgtaatggtaaaatagatcgcgttgaacgcgtgcgttgttcactatgattgaaatgcaaaaatacatcaagtacataaacactatgattaaaaaggttgcagacagaaaatatttcatctttaaatcttatgctaactctcaaaataaaatacatttattcggtttacgtatatttattcagtttacgttggttttctttgttactatcgtaactattaaatttgtgatcgtttttgccaggcataatttctttacacgtcagcttacgtatgtatgtaacgtcttcgtatagtgatttcttgatgttgccatcgtgaagcgttgtgggcttgagaggtttgcgattattattataaaaatgttgaactgaatattccatacttgcagcacgtattagttgcagcacaagcgatcgaagtataatgaattttttattgtattcagttattatatgattaattatacgttatcaataacggtcatggacgaattataaactcgctttacgagtagaattttactcgtaaaacataaccatttgggtgaattaaaacatgatgatgtcatttgtttttctgaactcaagtgttagtaaacagcgacgatgtcattatctttgggatgactcatttgtttttctgaattcggttgaactggctttacgagtacgattctactcgtaaaacataatcatgggatgactcatttgtttttctgaactcagctgaactagctttacgagtacgatttactcgtaaaacataatcatgggatgactaatttgtttttctgaactcagctgaactagctttacgagtacgattctactcgtaaaacataatcatgggatgactaatttgtttttctgaactcagctgaactagctttacgagtacgattctactcgtaaaacataatcatgggatgactaatttgtttttctgactgaactcgctttacgagtacgattctactcgtaaaacataatcaagaaatgatgtcatttgtttttctaaactgaactcgctttacgagtacgattctactcgtaaaatataatcaagaaatgatgtcatttgtttttctaaactgaactagctttacgagtacgattctactcgtaaaacataatcaagaaatgatgtcatttgtttttctgaactcgctttacgagtacgattctactcgtaaaacataatcaagaaaatttgtttttttttttttttttttttttttttgaactttgcattcacaaaccttcgtagttatatcgaaaattgttcaacggctctttgttaatatcgtaattaattaatatgtcgtacaatttggcagcattgtgtttacacacaacagtttttaattcttgaaacattctttcgtgtacgttcaacatgttgtattttagagtgcgatgtgtaacgcttgtgacgagcatcaaaatgataaaatctaaagctgccagtttataattgtgttcatatgctctataatcaccaacgactctgtggcccaacctttttaaattctgacaggcgttatggtacgagtcaataacgtttactatagtttctcttgtaatcggtttgtcgattaaactgttaactaacataacgttacctaagcgcgacggtttagtcgccgacttttgttcaaatttatacaaattaaaaacgctcatagattggtcgtcgggcagagtgtcgttatacaaacaaaatggtaaaacgttcaattcgacaaacgatgagcacattaaaccatgttgactgttgacatctttaggatgtaaattgttatttacaatgtaacacacttcaatgtcggaatgtttgttttcatatttgtccctatctacagtttcaatagtaatagagcggggtttaagtttattttgtaaatttatttgattagtgttgaaatgatataccactgacacattgtgaactatcgacgcttgattactttttatcatattcaaaatgtttataacatgtttaaaaaaagagtctgttaatttatttgtgtcgtcgttaaatatctctttccagggtttactattgcgcgactcaacaacggctgtgtaacataacaagcgcgccagttgcatgtgtgacaatttaatgttatcgatgtcggaaatatttggtacaagattttcattgccgtcttccaaaaggatactaagttcggtcgagtagtcattcaaagatcggttatgttcttcaaacaagtttaacgtcgcagattgaacataactttttatgttgtcaaaatggattatatcaatcttgtccttgttttccaacatgaacgataaaatttttatatcaaatttgatattcgagttctcgttggactttttgtaatttaacaagaccgtcaacagtttgtgtaattcaccattagcttgatcttcgctaaatagtttattgatagcataatttacgttgtcgttcaaaaacaacaattcgctgatgatcattttttgtaaaagcgtgtatttactcatgttgatagaatctcttacattcaattgtagacacgtttgtataaattggccatgtgatttggaatacacacaggaatcgtgcgggcgagcgccgtttggtgaaatagcattttttcatagccgctcaaacattcgcacgcgtccggcgaaaattgtacagtgtttaaatttatattcaatcgaccgccgttgcacagataaggcctcggcgttcctgtatcgtccactaaatctctgtacgtgctcacacatgtttgagacacgacaaaatctccgccggcggaaaaaacgtgcaccaaacccagtgccggatcgcattctatcaattccggcacttgagcgttcaccaaagcgtcggaggcgttgcaaaagccatcctgacaacttaactcgtttgcggcgctggaaatcacgcagttgtctctacactgttgatcggtcacacacggtaacctgttcaatgaacaatctacgcctcggctgcgttgaaacgtaaaatttaacggcggcgcttccaattcgttaatatgcatgtacgcatcttgtaaaataaaattttgaacaaatttaaacgtgtacatgtacacgactagtataattactaataaaataaatatttgccaaacgttcaacatgacgtcttaactgagtagcgtggcactttatcgtggtatataactcgacatcgaccgtgttaattttactgtcatgcatttgactgctaatgtattgctcgtttctaatgcgctcaaaaagcgagacgtgaaatacatttataacacacatttaaaaaattacagtataattgaaggcgtcatgtgttgtaatggagattgtttggttgtggcggtgttggaccaaaagcagctacaaaacatagacatggaagtgttggaaagtttagaatactccaacaacaacatagagctgttgcgcgaaaagatatgtgtaatagtggaaaattacgacaaatactaccaaaatgaataaaattgccattatatactattttgttttgttttattcaatacaacaccatcaataagtaaaatgtattttgctattatacttttgtttcttttaataattattgcaatagtttacacatatgtaaacctgatagatgtgcaccacgaagaagtgcgctatcctattaagatttttgacaacacaaacgaaccactcatcgaaccgccgtctgaaataataatcgagggcaatgcgcacgaatgtcacaaaactttgacgccatgctttacacacggcgattgcgacttgtgccgcgaaggattagccaactgccagctgtttgatgaagatacagtaatcaaaatgcgaggcgatgacggtcaagagcatgagacgcttattcgggcgggtgaatcgtattgtttggctttggatcgagaacgtgcccgatcttgtaaccccaacacaggcgtatggctgttggccgaaacaaaaacgggtttcgctcttttgtgcaattgtttacgacctggactcgttacacaaatcaacatgtacgaagactgcaacgtgcccgtgggttgcgcgcctcacggccgcatcgacaatatcaacagcgcttcaatccgatgcgtgtgcgacgacggatatgtgagcgactataatgtcgacactgaaactccgtactgccgtccgcgcaccgttcgcgacgtcatgtacgacgaaagttttttcccgcgggcgccgtgcgcagacggacaagtccgtctggataatccgggactcaatgatatttaccgcagacactttagactcgaagacatttgtgtaatcgacccttgttccgtggacccgattagcggtcgacggacatcgggtcgattgtttcaccatacaaccgaagatgacgtggaaatcagcggatgcaattgtccgattgatgacggattgctgcccgtgtttaatcgacacactgccgagacgggcatggttaaacaaagcgatcgcattgtcgcaaacgcttgtttgcaaccgttcaacacacacatgttatcgttgcgtcatgtggattacaaatttttctggggtcgcagtgaccacacagagtttgcagacgcggacatagtgtttcaagccgatgccagtcaactcagccacgagcgatatcgagcaattttgtaccaattgctcgaagtgcatccggacgtaacagaaatcataacagtcggtacaagtgtcatgaaaatttccgtgtcatacgacaccacactaaaaaattctttattaccaccctcaatttttgaactatttagatctaaagaaagaggcaccactgagccggcttgtttctatccaggcgtgggacgatgtatagttgcaaattccaattcttgtatcagaagacatggtaaccctcaagtgtggaccgcagaaacgttcaccaactcgtggtgtatattaagtcgcgaaggtacgcatataaaagtttggagtaacgcgtctcgatacccgcgtggcagcgctcctgccgcgttaagattgcgcggtttctttctgaacaacgatcgtgagcgaaacacagtaagagcggttactacaggtgacatgaccgaagggcaacaaataaacgcattaacccaaacacttgaaacttatcccaactattctgtgtgataacatgagtattctaaaagttgtagaagcgtacgatttagcaaacacttttttcaaattgggttatttgtttagggccaaaacgtgtttgaatatcgccatagagaacttggaagaattgtgtgaaaaaactaacataaaaaaagtagtaataatgttgaacaaaaagattgcacaatgtttgcaattaaaacaaaaaatagataaaaaaattacacaacgcgttttaataaaaattcacacaattaaatgatctgtgcagtttataactaagtgtgttaacacgtcaaactgctaacacgtgcatttatataagaattaaaatggatttgtttgcacgttgcaaaaaatacacaaggttgtcaactgacacgaaaagagactttccctatgtcgcgctgtcgtatatcaacgtgacactgtgcacctacgtagccatgttaataggatacttgctaacatttgataattctagcgatttaaaatatctacaatactggttgctgttatcgtttttgatgtctacgatgataaacgctccgactttgtggacgatactcaaaaccactgaagcccatgaagtgatttacgaaatgaaactgttccacgccatgtactttagtaacatgttgttgaattatgtggtgtttctggacaatcaaatgattacaaattttgtttttgttaacaatttaattcactgttgtgtaatttttatgatattcgttgaactgtttatcctgtttggtaacacaatgggcacatacaccgactatcaatatgttaaatcgtgttatattgtcgtattgtttgtttcgactatgagtgttacaattgttatgggtttacagtgtttgaaaacaaaattgattgaaaacggttttatgtttaacgtacttgtatgcgctttgtacattgtggttgcaataatttggtctttaaaaaatagttattatgtctcaaatttgcaaaatattaaagtcattccgttttcagacaatgatccgccaccaattttttctaacattgttatggatgaaataaaaaaataatttataaagatacattttattcatttacaattctataaattttaaacgaaaaatatgaatacaaagttattatgtcgttgtctaaatgaacatcaatttgtaaatctggacatctattcatatcatcgatattacaatctattatatcaatcaaatcatctttacaataatcttcattggttatttgcactgtggacggtgtcacataccggtccatttggcgttcgtgtactatcaactttctcgccaacctgtaccataaaaattgtttggacaaaaagttttccaacgaaggtaaaggccaatttaacgtggcgacacgcgcgtccgccggtatgcatttgttaaaaaacgcacaactcgtttttctaaatgaacacaaagctaccaaatatggggccattggttggtttgttattccgagatgactcaaaataaaccgatccgtagtgggatgataattagcgggcgttagtttcaaataatcttcaaagttattgttgcgcaaaagtcgacattttgcacatgttgttaatcctacgacttttgcatgcaaaactggattcaaatactgcagaatcatgtctataacttccagcggtagatttgtaacgctcgacatttcgataacaactaacacaaaactaaaatgcgactgctttttaaaattcatctttgagtttaaaccgcgtgttcatcgcgttgagcaaatcgccgttgtcggcatcgatctcccaagcaaacaggccgcctagtttgtttcgatcgacatatttaacctttcctaaaacagaatcgacgctgtcgtacgaaattaaatcgcctttgtttttattgaaaacgtatgacgcttgagctgcgctgtcaaacgtatacacataattgttgagttcgttttgaatttgacgataatctacaacgccatcctcccacgtgcccggtattggcccgttgccagttccggtaaaatagttatcattcgtataatttgttaggccggtccaaccgcggccgtacatggcaacgccaataattattttgttgggatcaacaccctgtttaagtagcacactgacagcgtgatgtgtggtgtataactcttccgagttccaactcggcgcgtaaattgtggtttggtagcccaaatccgtgtttgaccaagcacctttaaaatcataattcattaaaaatatttttcctaaagacttttgcgcctcgtcatagtttaccacggcaatcttgtcgtaacccgcactaatagcgcttgttaattcgtaaaccctgccagtttgcgattctagctcgtctaacattgcgcgcagttcctctaatattaaaatgtatgttttggcgtcacgttcagcatcccccaacgacgggttggctcctttgcctcccggaaattcccaatcgatgtctacaccgtcgaaaaatttccatacttgtaaaaactccttaaccgaatttacaaaaacgtttcttttttcaacattgtgcatgaaataaaacgggtccgacaacgtccatcctcctatggacggaagaatctttaggtgcgggttcgccaatttagctgccatcaattgtccaaaattgcctttatacggttcgttccaagcggacacgcccttttggggcttttgtacggcggcccacggatcgtggatggcaattttaaaatccgcacgtcccctgcacgatcgttgcagagattcgaaactaccgggtatcactttgagagcatcgtttattccattaccgccgcaaatgggtatgaaaccgtacaacaagtgtgataaatttggcaagggaactttgtctacgggaaaattgcgcccgtacactccccattcaacaaaatacgcagcaaccgttttatcgtctcttctgcccggtttgttgttttcccgccatgtatattccagcggagccaaatgaccgccgtcggtgtctgccactttgaccaacacggaatcgctcacggaacagccgtcctcattgcacaatttgacgcgcgcgttgaattgcccgcttttagaaactttaattgtagcttttttacttgcagcgtcacctttccatacctgtcgatcatcaaacagcacatacgctatgtcgcccatgtcgccgttccagacgttccaactaacttggacatcgacatgttttttaggctttattaaattttcgtaagcggtggcttcgtaatttatttcaacgagcgcataattgcgatcggcccaatcgatcaccggcgtgccgggaattgcacaagttacggcaattagcgacaaaacgtttaacaatttgtacaacattttaatttatcttaattctaagttgtaattattaaatgtaaaaaatgaataattttttgttttatttgttcgtgtacggtgttgtaaacatcgcggcatacgatcttttgaaagcgcctaattattttgaagaatttgttcttcaattcaacaaaaattatggtagcgaaattgaaaaattgcgaaggtttaaaatttttcaacacaatttgaatgaaattattaataaaaatcaaaacgattcggcggccaaatatgaaataaacaaattttctgatttgtccaaagacgaaaccatcgcaaaatatacaggtttgtctttgccaattcagactcaaaatttttgcaaagtaatagttttagaccagccgccgggcaaaggaccctttgaatttgactggcgtcgtctcaacaaagtcactaacgtaaaaaatcagggtgtttgcggcgcctgctgggcgtttgccgctctagctagtttagaaagtcaatttgcaatgaaacataatcaattgattgatttgtcggagcagcaaatgatcgattgtgactctgtcgacgccggttgtaatggcggtttattgcacacagcattcgaggccgtaatcaaaatgggcggcgtacaattggaaaaggattatccatacgaagcggccaacaacaattgtcgtatgaactccaataaatttttagttaaagttaaagattgttatagatacatcattgtgtacgaagaaaagcttaaagatttgttacgcagtgttggccctattcctatggccatagacgccgcagacatcgttaactataaacagggtatcataaaatattgtttaaatagcggtctaaaccatgcggttcttttagtaggttacggtgttgaaaacaatataccatattggacttttaaaaacacttggggaactgattggggagaaagcggatattttaggttgcaacaaaatataaatgcatgtggcatgagaaatgaacttgcgtctactgcagtaattgtctaatgtgtaatttaataataataataataccaaatataattttaccaaatatatttattgttatttaatattgatgcctgctacggtttctaatcatacagtacaaaaataaaattacaataaatataattacaaagttaactatatgaccaaacatgaacgaagtcaatttggtggccaattcaccttctgccatagaagtgatgtcgtttagactggtgccgacaccgccaaacttggtgttctccatggtagttatgaggttgcttttttgttgagcaataaacgaccatccgctagcatctttccaactgtcgtgatagcttgtattgccgatggttgggatccaaaactcgacgtcgtcgtcaattgctagttctttgtaattactaaaatctatgcattgcgaagaatccatgttggccacccaacgtccttctttataaatgctgttgttgtagcaattactggtgtgtgccggtggattggtgcaaggcatcagcaaaaaggtgtcgtctgacaaaaacgtcgaagaaacggagttgttcattagattgccgattaaacgttcgtccactttggccacggacactatcaggtcgtgcatcatattgtttagtttgttaatgtgcgcatgcatcagctcgatgttcatttttagcaaatcgttttcgtacattagctcctcttgaatatgcattagatcgcccttggtggcagagtctccttctgtgtatttgggtctaatgtcataacgccaagtgggcggtcgatttttgaccttgtgttcaactttgcgtttaatgcatctgttaaatttgcaattccacgtgtttttggaaagatcatatatgtcgttgtcaatcaaacaatgttcgcgagtcaccgaatcggggttatttttatcatctttgatgagcaaacacgcagcttttatttggcgcgtggtaaaagtagacttttgtttaagaatcatactcacaccgtctctatgtagcacagtgtctacgctcacgttaatgggattacctccaatgtccaaaatatgtacttgacattcgtccgtgtcgtcttgacacacaagctttgtgtacatttttgaagtggaaacgccgcatcgccacgatttgttgcacgtgtgatacgcaaagtggttgttatttttacgttttaccaactctttgcctttcacccactggccgcgaccctcgttgtcgcgaaaacactcatagctgtcgctgccccaacggtcgattagctcttcgcccacttcgcactgttgcctgatgctccacatgagcaaatcctctttgcccacattcaccgttttcaaagtttcttcgatgcgggtgtttgaatccaacgagcctccattgtacgcatacgcttgatagtaacctttatagccgataatcacgttttcgttatagtccgtctccacaagggtaatttccacgtctttttgaagagtttctttgggaggggtaatgtctaaatttttaatcttgtacggacccgtcttcatttgcgcgttgcagtgttccgccgctaaggtagttgtcgccgccgccgccgccgccaaaatcattaaaacaatagtgctcatcgtcttgcttgtgctctcctctttaaagcctcgatgtgactgatttactagtagtattgaagcatcttatatacctcttattaacgtgatacaatgcacttaattgataagattataaaaattaaatcatgaacaaagacactcagtcggtatcggacactctcaacttcagctattctcccgacagcaatctggaagttgtaatcataactaactcggacggcgatcacgatgggtatctggagctaaccgccgccgctaaacttatgctaccttttttaagcaacggcggttcggctgtgtggaccaacgcggcgccctctcacaaattgattaaaaataataaaaattacattcatgtgttcggtttatttaaatacttgtccaattacaatttaaataataaaaagcgtcctaaagagtattacatacttaaatcgatcattagcgatttgcttacgggcgctcaaaacaaagcgtttaacccgatgtgcgaaataaaaacgcaactgtgtgcaattcacgaaggtgtcaacgaaactatttcgattttaaaagttgatgatcctcccgtgtcggaaattaacaagtttcaaggtctgatacaagatttgcagttggagtacaataaaaaaattacctttaccactgatactattttggaaaatttaaaaaatataaaagatttaatgtgtatgaataaataaataatataagggttttgtacaatttcgacaatgaatttttggactacgtttagcatttgtctaattggatatttggtgtattcagggcatttgaataacgagctgcaagagataaaatcgatattgctgatcatatacgaatccatggaaaaacatttttccaatgtactaaacgagatcgattctcttaaaacggacacgtttataatgctgaataacttgcaaaataatacgattcgaacatgggacgcagttgtaaaaaatggcaaaaaaatatctaatctcgacgaaaaaattaatgtgttattaacaaaaaatgggctatccacaacgtgaaaacgttcatgctatcactaagttaataaattaaaaatcacatagacactacaatatttcaaaatgaaaccgacgaacaatgtcatgttcgacgacgcgtcggtcatttggatcgacacggactacatttatcaaaatttaaaaatgcctttgcatgcgtttcaacaacttttgttcagtattccgtctaaacatagaaaagtgatgaacgatgcgggcggatcgtgtcacaacgcggtcaaatacatggtcgacatttacggcgctgccattttggttttgcgaacaccttgctcgttcgccgaccagttgctcaccacatttattgcaaataattatttgtgccacttttgtcgtcgtcgccgatcaagatctagatctcgatctcgatctaggtctccacattgtagaccccgttctcgttcccgttcccgttgccgttcgcgttctcgttcccgttcaagatcacgatctagatcacgatctagatctagatcgcggtctactagacggatattcgattcattggaaaaaattcgtcatcaaaacgacatgttaatgagcaacgtcaaccaaatcaatgtcaaccaaactaatcagtttttggaattgtccaactcaatgacgagcgtgcgcaatcaaaacctgcagcttctcgcggcgttggaaaatgccaaagatgttattttaactcgattgaacacgttggtcgcggagctcacacagtcgttgcctgacttgacgtccacgttagataaattgttggacgccatcactacggtgcagcaaacgatacgaaacgagttaaacaacactaactctattttgaccaatttggcgtcgagcgttacaaacatcaacgggacgctcaacaatttgctagccgccatcgaaaacttaattggcggcggtggtggcaatgaagctgacagacaaaagctggacctcgtttacacattagttaacgacataaaaaatatactcatgggaaccgtgacaagaaaataagcatgtccgacaaaacaccgacaaaaaagggcgccagtcatagtatgacgttgcgagatcgcggcgtaacgaaacctccaaaaaaatctgaaaaattgcagcaatacaagaaggccatcgctgccgagcagacgttgcacaccacttcaaatgtttctttgcagaaatttaatgagagtaaagtttttaaagagttggaaaggttagaaaaagaagctgtaattttagaaagtgaacaaaaacgattgtatccaatgttagatatgccacttgataattttattgtcgcattcgtacatccaacgtaccctatgtcctatttcgtcaatacagattacaaattaaaactgaaatgtgctagagtcaacagcgatttgatttacaaaaacaaaaacgaaattgctatcaacagacctaaattatcatcttttaaattgcaactaaacgatataatttcagacactttagaaaccattgaatatgatatagaaagcaaaactctcacaatcactgcgcctgttcaagatcaggaaataaaaaaatccattatttattttaatatttttaattgcgatagttggaaagtgccgaattatatgaaaaacttatttgataaaatgcgattggaacctcccgtcattttaccattaggttattagctttgctgagactaggacgttaacatcatgttttcatctttgacctcagatcaaaagatgttattaaaaaaatataaatttaacaattacgtgaaaacgatcgagttgacacaagcacaattggctcactggcgttcaaacaaagatattcagccaaagcctctgaatcgcgcagaaattttacgagtcgagaaagccaccaggggacaaagtaaaaatgagttgtggacgcttctacgtttggatcgcaacacagcgtctgcatcatctaactcgtccggcaacgtgttacaacgacctgcgcttttgtttggaaacgcgcaagagaatcatgtcaaagaaaccaatggcatcatgttggaccacatgcgcgaaatcatagagagtaaaataatgagcacggtcaccgaaacggttttggattgcggcatgtttttcagcccgttgggtttgcacgccgcttcgcccgatgcttatttttctctcgccaacggaacgtggatcccagtggaaataaaatgtccgtacaattacagagacacgaccgttgagcagatgcgcgtcgagttgggtaacggcaaccgcaaatatcgcgtgaaacacaccgcgctgttggtcaacaagaaaggttcgccgcagtttgaaatggtcaaaacggacgcgcactacaaacaaatgcagcggcagatgtatgtgatgaacgcgcctatgggattctacgttgtcaagttcaaacaaaatttgatagtggtttctgtgccgcgcgacgaaatattttacaacaaagaactgtcgacggaaaacaacgcatatgtagcgtttgccatagaaaactccaactgcacgcgctaccaatgcgccgacaaacgacggctttcgtttaaaactcacagctgcaatcacaactataacgattttgaaatagatgctatggtcgaccgcggaatgtatttagattatggacatttaaaatgtgcatactgtagcgattttagcgcagacagtcgtcaagagtgtgattatgttttaaaacgcgaacacaccaactgcaaaagttttaacttgaaccataaaaattttgacaatcctacatactttgattatgttaaaagatttcaaagtttgctaaagagtcatagaaacgacgctaaaacgctcgcttattttggttactatttaactcagactggaagtctgaagactttttgctgcggattacaaaactcgtctcccaccaaacacgatcatcttaacgactgtgtatattattcgaaaattaaataaaaaacttttttattatcaattattttatttacccaagtttttgtacatactcgcaatttttatctcgagatagctttgcgtgtgtccttaccagatcatttatgttataaatatcgacgttgtctgtgcatttaccattgcaatattgccattgcagaacattagaagcgtcaaaatgtgtgtaatttttccagtagaaatcgatgtgtctcagacagtcattaaagattgtcaggtgaacaaacagactagagagttggtgtacatcaacaagataatgaacatagagttgacaaaaccagttcttatgatgttcaacatttcgggtcctattaaaagcgtcacacgcaagaataacaatttgcgcgacgaaataaaatcagaaatcgataaacaatttgatcaactagaacgcgaccacagcactcaattcgatggaggccattgcatcaagtattttaaagatgaacactattcgattagttgccaaagtggcaatgtgttaaaaagcaaatttgaaaaaattttaaagagccatggttataccgatgaaaaatctatcgaagcttacaaaaaatactgtttgcccaaattggtcgacgaacaaaacaactattacgtggccgtgtgtgtgttgaaaccgggattcgaaaaaggcagcaatcaagtgctatctttcgagtacaacccgattggtaataaagttattgtgccatttgctcacgagattaacgatacggggctctacgaatacgacgctgcagcctacgtggacaatgtgaagtttgatggtgaacagcaatttgaaaagtttgtgcaaagtctaacattgccgtcggcgtatgacgatgaagaggttttatattacaatgaaacttcggaaaacaaaagaatgatgtacaaagctctggagtttaaaacaaaatcctgctggggcaaatttgaatgggattattggaaaattttttgtaacggttttatttatgatgaaaaattaaaagtgctgtatgttaaattgcataatgtaactagtcgagtcaacaacaatataatattaaacattgattaaataaacgatatttaaactgatgtcgctgcatttgtttttcgaacccaaatcgctttaatcaagaaatgatgtcatttgtttttatgaactgaactcgctttacgagcataattctactcgtaaaacataatcaagaaatgatttcatttgttatgtcatttgtttcgaactgaactcgcatgactaatttgtttttctgactgaactcgctttacgagtacgattctactcgtaaaacataaccatgggatgactcatttgtttttctgaactctgttgaactcgcttaatcataaatgagtcaataaatgatgtcatttgtttttctgaactgaattcgctttacgagtacgattctactcgtaaaacatgatcaagaaatgatgtcatctcggctgaactggctttacgagtacgattctactcgtaaaacgtaatcaagaaatgactcatttgtttttctgaactcggctgaactagctttacgagtacgattctactcgtaaaacataatcatgggatgactcatttgtttttctgaactcagctgaactagctttacgagtacgattctactcgtaaaacataatcatgggatgactaatttgtttttctgaactgaactagctttacgagtacgattctactcgtaaaacataatcatgggatgactaatttgtttttctgaactgaaataatcatgagatgactcatttgtttttctgaactcggttgaactcgattaatcgtggatgagtcaataaatgatgtcatttgtttttccgaactgaattaaactcgttttgatttatttatacgcaatacgttatattgaacggacgttatggaattgtacaatatcaaatatgcaattgatccaacaaataaaattgtaatagaacaagttgacaatgtaaacgtgtttgtgcgtacgcttgaaccgggtcaagaagtgtttaacgaaacattgagccaataccaccaatttcccggcgtgatcagttccattatttttccccaagtcgagctgaacgacgagattagcgttttaaccgatgacggcagcttgttaaagttaaaactcgaatgtaccggttttaattttcacgtttgcaataaacgatttgtgtttggcaatttgcccgctgcggttgtaaactgtgaaacgaaacaaaaattgcgcattggcgctccgatttttgcaaacgaaaagctaatttcggtcgtgacggcgtttcatcatgtttgtgaaaacgaatggctgctaccggtgacgggaattcgagaaatgtctcagatgtcgggtcacatgaaggccccgaacggcgttcgtgttgaaaaatggcgccccggcacgtccgtttacggaacggtgcaattgccgtacgacaaaatcaaacagtatgctctcgagcaagagaataaaatgccaaacactttggagtcttgtgtgatatttttcaaagattcggaagttcgaatcacttacaacaaaggggaatatgaaattatgcaattgagggtgccaggacctttaattcaaccaaactcagcatattatgattaaataagaataattattaaataatttgtatattaactaaacgctgtaccataaaatacatttttaataaatcatgtcaaagcctaacgttttaacacaaattttggccgccgttgcggaaactaactcaaaggtcgacgctatccaaactcaattgaatggtctggaagatttggacggtttacccgctcaattaaccgagcttgacactaaaataacagatattcaatcaattttaagcggagatgttccagatgttccagatgttccatcaagtaatgtagcagacaagtaaatttaaaataacaaatcgatcactttataatattcgtacgattctttgattatataataaaatgtgatcattagaaaaactacgaaaagtatgaaaaatatgagttctgtgtgtataacaaaagctgtaaacgccacaactgtgttaattgcaaataaacccacgattgtttgattaaaattgttgttttctttgttcatagacagcagtgtgttttgtctaaacgtgtattgcataaactccatgcgagtgtacaacgaactggcggctaacgcctgtccaaccaaagtagattcgtcaaaatcttcgatttcatcgccttcctctaaattcaacatttgaccgtcggaattaacttctaaagatgccacataatctaataaatgaaatagggattcaaacgcggaatcgtcatcagtttcgaccatttccgaaaaaaagtcgggtataaactctatgatttctctggacgtgctaccgtccaaactctcaaagtacgcggtcaaaaacgagcgcgacatgtcttcggggaagtcgcgcgaaaacatgttgttgtaaccgaacggatcccacaaagccaagactaaatctgccaacgtcaataatactagcactatgccgacgatggagctagcttgaatagccattcgggttaacgctttggcagccgtagtaagcgttttgatggcgattttgttgatcgtatgaaccacagcggctttgtaagtttctcccaacatgcgcacagtcacacggcgagtcgcgctaatcaacatgcgtttcatggacggaatgagagttgtgttaattttttttaacatacttttaaaccccgtaaatagtttatcaaagccaatgtccgtagcgataccaaaaatgaacgcgtgatcttctaaaaacgccgttataattgactccaagtcttggtcgctgattgagcggtcgagcgtttcaagatgttcgacgcgtgcacgttcgtgaccacggtagttatatgtgattggagttttagtaaagcctgtttcagccgtgtacgtgatttggacgggcgatccgtcgacgatcatgcccaagtcgtttagtgttggatttttgttgaaaagagtttcaaattccaaatccacagcgttatctcgcacattgcgccattgttccaatattgcattggaattcacgttgggtcgtggaggtaatatgctagaaggtgctctgtaatcgaaatcgcgcagttcgctaaaaatgctgttggccatcattttgaaagtggttaggattgtgtcgcccaaaacgaatccgatgagcgattcccaccatctgaacgaacagccgccgtttatcaactctctgccgaaacggcgacaataagcttggttgaattctcctttgaaacgttcgggaaacagggggtctggatcgggttcaacgttaaaggccggcacgtcgtccacgcccatgattgtgtgttcttcggtgcgcaagtacgggctgttcaagtacattttagacagagagtccactaagatgcatttgttatttagtgtgtatctaaattcggccgactgaacttggttttctgcgccttcacgcatggccgccgccctgtccaaatggtagcacgcgggctgcgcgtagcctattctagtatcggaagtttgagtgtacatgaacggtgtcgtgttagacacaacgccggtttcgtgaaacgggtagcagctcatactttcacaaccgcgcttgctgaacgttaatttgacagccagcgctctgtcggccaattttggcggtacataataatcgtcgtcgcttgacgcgggacgcagcgtgtagtcgattagaatgttaggaaatcgggtgcgccatctcgaaataaactcgagacgatgcatatgtgtcgcatatttgctggcgttagttaaatcgacggccgttaaaactgccatgttgcatcagtcttaaaataaacaactttgtattataaagtatttatgtattaaaagtaaagattacttttacatttaaccacatatagatagtttacatttaaccacatatagattacatataaacttaaccttttgttaattttttatacatttttaaatcatagtataaaatcatttcgttgtgcatttcaaagcttttgacagcttcaggacagtacacaaattcagaatatttataaaaatgaaaaacgttggtaaacccgcatttagtacaatataacacgggatttttatagtacaatttggtttttttacacaatttgcaatagttgttaggcgctgttgtaagtttagatttcagtggaaacgtgatcgggccgtctaatgcttgagtaaacctttttattgtgacagttgcaaacacggttcctttgatacccgaaaatcggttgtcttgcaaagcgtccatcatttcgctttggtcttgaagcataaaacagtcaacgtcatccgccacgtcgggtctgacgccaatgtttcggtagcgccgcaacactatgttattgtatgtttctctaagaacaagaccgccggtggtgctaagatcgatcttttcaatgcactcgttagatcctttgtgattttgaattatgcgcctaatcatttcaaatactttgcaattatgatcgtcaattctcaactctttaacttccgtcgtgtaatccaaacttacagggaaaatgtattgataaaaaaatctctctttggctaaatgtttaagatcggccgaattgatagaaggatatatttcgtacgagtttagagcgtcgttgtggtacaaataacaatcttgacaacatatatctatgcgggtggggtcgtctaatggctttttgatgtgaattacaacatacaaaaaccatacacgtgtgtcgtctttgaatctgtaattgcaactggtgcatcgtgattcgctcatatgctctgtagattttttgtttttgacagacctgcttgcaaatttacccatcatgcgcatatctttgttgttcacatagcctataatgtaatttgtggcaaattttagcgtcgctttcatgatgtcgcgttctaaatcactcaagaaatgcatacgcaaatcgcgttcttgtttaaaatccaatttgtcgctgtattttggcaaaccttcaaacttgtttccaaagtcaggcggcacgaaatatccatctcttctattgacagtcggtttgacgcttaacgaaagcggggtgtgcgtaggaggaatgaacaccagcgacgacgacgacgacgccatcttggcggatggcgttttgacgagttcggtagtctttgaagcgtcaaaaatgtacacttttgtctttgaaaccttagtctttggcgggttaaaagtttttggtgtatcaaaaatgtaggcgtcattctttgcgcgcccgatctttgacgtgtcgatcccaatttttggggtgtcaaaaatattattctttcggaaaaagcggttcattgtaaaacagtcagtcggctcactcctcaaaattcaacacgatactgttcatgttcaaccatcaagaggctttatatacgaaaaccttatctaataactgttcatgcgtaaaagactggttaccaggcgttttgcacacgttactaggcttgtggagggggatgtctatataaagcccgtttgcccaactcgtaaatcattgtgcttgggtgcgcgcagcgactatataagataactgcaaagtaacatgataagaaccagcaatcacgtgctgaacgttcaggagatggcgtcatcgccctattcgtgcgaaacgacgtccgcttgcgcagaaggtcaacaggtaatgattgataatttcgttttctttcacatgtacaacgccgacatacaaattgaccctaagctgcagtgcggcgtgcgctcggccacgtttgcaatgatcgacgataaacatttggaaatgtacaaatatagaatagaaaacaaattttttcattattacgatcaatgtgccgacgttgctaaacccgaacgtttgctcgatggcgacgacgagtgttgtcaccattttatttttgacgctcaacgtattattcaatgtatcaaagagattgaaagcgcgtacggcgtgcgtgatcgtagcaatgtgataatattttatccgtatttgaaacagttgcgagacgcgttaaagctgattaaaaactccttcgtttgttgttttaaagctataaattctatgcaaatgtacgtgaacgagttaatatcaaattgtttgttgtttatagaaaagctagaaactattaataaaactgttaaagttatgaatttgttcatagacgatgtggttttgtacgaatgcaatgtctgcaaagaagtatctacggatgaaagatttttaaaaccaaaagactgttgcgaatacgctatatgtaacgcgtgttgcgttattttgtggaagacggccgccacgcatgcaaaatgtccagcgtgtaggacatcgtataaataagcacgctatacaaaatgagtgttgacggtggcatgttaactttggaaaaaaatcattataaatatctttttttaactagctattttgatttgaaagacaatgaacacgttcctgcagaacctatggcgtttattcgtaactatttaaattgcacgtttgatttattagacgataccgtgctcatcaactatttcaattacttgcaaagtatgcaattaaaacatttggtgggcaacacgtctacaaacatttttaaatttgtaaagccgcaatttagatttgtgtgcgatcgcacaactgtggacattttagaatttgacacgcgcatgtacataaaacctggcacacccgtgtatgccactaacttgttcacgtccaatccccgcaaaatgatggcatttctgtacgctgagttcggcaaagtgtttaaaaataaaatatttgttaatatcaacaattacggctgcgtgttggcgggcaatgccggtttcctgtttgacgatgcgtatgtagattggaatggcgtgcgaatgtgcgcagcacctcgattagataacaacatgcatccgtttcgattatatctgctgggcgaggacatggctaagcactttgtcgataacaatatattaccgccgcatccttctaacacaaaaactcgtaaaatcaacaattccatgtttatgctgaaaaacttttacaaaggtttgccattgttcaaatcaaagtacacggtggttaacagcactaaaatcgtgacccgaaaacccaacgatatatttaatgaaattgacaaagaattaaacggcaactgtccgtttattaagtttattcagcgtgattacattttcgatgctaattttcctccagatctgctcgatttactaaacgaatacatgaccaaaagctcgatcatgaaaataattacaaagtttgtgattgaagaaaaccccgccatgagcggcgaaatgtctcgcgagattgtcctcgatcgctactccgttgacaattatcgcaaattgtttattaaaatggaaatgaccaaccagtttcccatcatgtacgatcacgaatcgtcgtacatatttgtgagcaaagacattttacaattaaaaggtactatgaacgcgtttttcgcgcccaagcagcgtatattaagtattttagcggtgaaccgtttgtttggcgctacggaaacgatcgacttccatcccaacctgctagtgtaccggcaaagctcgccaccggttcgtttgacgggcgacgtatatattgttgataagaacgaaaaagtttttttagtcaaacacatattctcaaacacggtgcctgcatatcttttaataagaggtgattacgaaagttcgtctgagttgaaatcccttcgtgatttgaatccgtgggttcaaaacacgcttctcaaattatcgattcccgattcggtacaataatatgatttatacagatcccactaccggcgctactaccaacacagacgcaccgtctgcaaactatttaaataagctaactccaaacatgtttttgacaattttggcggtggtggtgattatagctttattaattatatttgttcaatctagcagcaatggaaacaacagcagctcgcctgccgcagctccacaaatgggtttcgtaaatcctttaaactctaccatgcgagctaatccctttatcaacacgcctcaaagacaaatgttgtaataagtgtataaaaaaatgaaacgtatcaaatgtaacaaagttcggacggtcaccgagattgtaaacagcgatgaaaaagtccaaaaaacctacgaattggccgaatttgatttgaaaaatttgagcagtctagagagttatgaaactttaaaaatcaagttggcgctcagcaaatacatggcaatgcttagcaccctggaaatgactcaaccgctgttggaaatatttagaaacaaagccgacacccggcagattgccgccgtagtgtttagcactttggcttttatacacaatagatttcatccccttgttactaattttactaacaaaatggagtttgtggtcacagagactaatgacacgagcattcccggagaacccattttatttacagaaaacgaaagtgtgctcctgtgctccgtggacagaccgtctattgttaaaatgttaagtcgcgaattcgacactgaggctttagtaaactttgaaaacgacaattgcaacgtgcggatcgccaagacgtttggcgcatccaagcgcaaaagcgcgacgcgcagcgacgattacgaatcaaataaacctagctacgaggattttagcgatttcagcataactgaagttgaagccactcaatatttaactctattgctgattgtcgaacatgcctatttacattattatattttcaaaaattacggggtgtttgaatattgcaaatcgctgacagatcattcactctttaccaacaagttgcgatctacaatgagcacaaaaacgtccaatttactgttaagcaaattcaaatttactattgaagattttgacaaaataaactcaaattgtgtaacatcagggtttaatatatataattttaataaataacataaaaatacaatgcttttattaattatatttttaatattagttaaagtgttaatatttaaaaagatgaatcaaattcatctaaatagtcatcaagataaaatctgtcccaaaggatattttggtaacaacagtgatccctatgattgctcggcctattatatgtgtccgcataaagtgcaaatgttttgtgaaccaaatcacgaatttgatttagactctgccagctgtgtgcccatcgtttacgatcacacgggcagcgggtgtacggctcgcatgtacagaaacttgttgatatgatgaagggtgagtttccagttgcacgacactattatcgatttgcagttcgggacacaaatgttgaaatacatcaatgtctttgtgatgtgcgcggcacttttgtaaattattgataaaatgcaccgacacgttgccagacattatcattagatccttggcataaaatttgtcgggtccgccgtccgtgtgcgcgagcatgcccgttatagctctcgtacttttggcttcaaatgttttgcgcaccgacaaaatatgccagacttgcagctctgcatgtgtgcgtgtcaccacaaatcccaacggcgcagtgtatttgttgtatgcgaataaatcccgataaagacgcggcgcgcgaatgcaactgatcacgtacgctccttgtgttccgttcaaagacggtgttattgacctaaggttaatgtttatcggtcgcttgttttcgtaaccgctcaccaaacgggtcttgtatgtcggcggatgttctatatctaatctgaataaataaacgataacagcattaactttagagggcataataaaagagataatgttatcgcgttcgccattgggacagtataaattgacgttcatgttggatattgtttcagttgcaagttgacactggcggagacaagatcgtgaacgaccaagtgactatgacgcatataaattttaacgcgtcgtatatcagcgcttcgacgccgtcccgagcttcgtttgacgagttttgtgaaaaacaacccaatgattataatgtgggctataacctggagtacaaccaacagactccggatgtcgccgatacggtgttatcggacagcgagactgctgcagcttcaaactttttggcaagcatcaactcgcattctgacaacgatttgatggaatgtttgtttaaagctacgaatgatctcaaagaaacagtcagctctgcttattattcagaatctatcgagcagcctttagcggagcagccatcgcccagtcctgagcattccgatgctgtgaaccaaccatcaacaagtggaactaaacggaagctggacgaatgcatggacagttcgcaaggtgcaatgggtcagtttaacaaaatcaaattcagacctaaatacaaaaaaagcacaattcaaagcagtgcgaccttagaacagacgattaatcacaatacgaacatttccacggttgcttcaactcaagaaattactcattattttaccaacgattttgcgccatatttgatgcgatttgacgataacgactacaattccaacaggttttctgaccacatgtctgaaacgggttattatatgtttgttgttaaaaaaagtgatatgaagccgtttgaaatcatatttgccaaatacgtgagcaatgtggtgtacgagtatacaaataattattacatggtagataatcgcgtgtttgtagtaacttttgataaaattaggtttatgatttcgtataacttggtcaaagaaactggcatggaaattccccattctcaagacgtgtgcgacgacgagacggctgcgcaaaatcgtaaaaagtgccattttgttgatgtgcaccacacgtttaaagcagctctgacttcatattttaatttggatatgtattactctcaaactacatttgtgacgttgttacaatcgttgggtgaaagaaaatccggttttcttttgaacaagttgtacgagatgtatcaagataaaaatttatttacattgcccattatgcttagtcgtaaagagagtaatgaaattgatactgcatctgataattttgctgtatcgccgtatgtgagtcaaatattgaagtattctgaaaatgtgcagtttcccgacaatgctcctaacaaatatgtcgtagataatttaaatttaattgtaaataaaaaaagcacgctcacgtataaatatagcagcgttgctaatcttttgtttaataattataaatatcatgacaacattgcgagtaataacaatgcggaaaatttgaaaaaagttaaaaaggaggatggtagcatgcacattgtcgagcagtatttgactcagaatgcggccaatgaaaaaaatcacaattttatagtattgtcttttaaaaacgaggagcgattgactatagttaaaaaaaataaagacttttattggatttctggcgaaattaaagatgtaaacgttagtcaagtgattcaaaaatataataagtttaatcatcacatgtttgtaatcggtaaagtgaaccgaagagagagtactacattacacaataatttgttaaaattgttagctttaatattacaaggtctggttccgctgtccgacgccataacgtttgccgaacaaaaattgaattgtaaatataaaaatattggatttaattaattaattacatttttattatatatttgtggttattattattatcgaggacccgtcgttgatgtggggttttgcatagaaataacaatgggggttggcgataccgatgcacttccgccgcttcctcctcctcctcctcctttcataatgtatcgatagataaaataaaatattaaacctaaaaacaaaactgcacctattaacaaaataattggcatcagtttgccactaacactgtcactgacgttagacgatttgcctaccaagccttcttcgcccaataaccaatctagacccaagtctccgatcaaatcggcaaacgagtagggttctatacacgtaatagtttggttcgcaggaagatcactaatgtcgacgtattgcggtgaatctgggtcggctgacggatcgctgccgcgacaaactgttttttccgcttcataatcgaatccttgacacatgccagttaattcaggagggttttcaggtaacagcggatcgaacttgcaaatggcaacatccgactcaattagattgggatcttgacgacaagtacgctgcaataacaaacaagtatcggcgttttctccaccgtctctaccttggacgtaataactgccaccggtgttattgagggcgtctattatatctcgtaataatgtggcggcggtatacaacaaataaccgccggtggccaaaagtacggcttgtccacctaattttaaagtttgcatgtgagaatgtaaacgaggatttctctgcagtgcgttttgaacaccttctggcgtgcgcacgttggtttccggaaagttttgtttgactgcttgggatcgtgttcgtttggtgtgattattaaaatctggcacgttgtccgcgcgccgcaattgacccagtgagtttatttgaggatctgaaatgccttgaaatactccgcgtatgttggggacgtcattattgcgagtgattctgtttatgtctgatgtgctcacaaactggttgttagatagctgatagcccggctggtatctgttatttccaatgttgcgtacactaggtgcgctgagcacatttgtaaaaccgactggagtgcttgctaaaagacgagcgttgtcagaaataaaacctgcttgattgggatacaatttattgactctacgaaggtttgaaaaaaaagtcattttaaagcaaacttatttatttgcaatttgagaaacttacattaaaggttttgcgagactgccgtcgtcaatggttttgcgagactgccgtcgtcaatattacacggtagcggctccatcttgttaaaatctaattttcttttcgctttaggctttgtataagccgtcgtataagttgtctcgaaattcgaatcactgataggctgtgtgtaagctgtcgtataagctgctgtctcgaaattagaatcatccttcgaatcatcttttatgttattttttttcaatattgatgcgctccaagccgcacgttggtaacgttggtatggatgaaatctcttcattgttatgtggtaaaaaataattcaattgtaattaaatatgtgtaaattgatcgcgtttaaacctatcttcaaaccgatcactttaattatactagtttgtttattactttatttaattaaaaaaattatttttacatcaaaaaatatatatatcgactacgacgacgacgacgaagttttcacttgttatgacaaacttggaataaatccgccaatttttccacatcctactaaatgtgacgttttctacatatgcttttttactactgcagtaaaaaaacattgtaattttgatggttgggaatttgataacgatttaaaaaaatgcgttccaatatcagacaatggatgtactgctaaccaaaatttattagtttgacataacattttgtaattttaaaactaaatcagagttacagtgtttaaactcttcaaatttgacttgagactcggccacctgcttatccaactgatcttgtagcattttcacagtcgattgcaattcttccgatttcttgttagcttcttgtaaatcatagtttgccttttgtaaatccaattcggcaacagcgtgtttatgtttgagcatgatgtaatcgctgtccatcatagtcattctatgtccgactctaactcgcaaatttgacagttctgtttgcatttgcttcagttctttttgtaatcgctccacataattcaagtccgcagagatattgttaaccgtattattttccaaaagctcgcaccaatgttgtttaatggaattctcatttaaagccgcgccactgggcttaaattccacatacccgtctttattgtacacgcgaaaattagatgaagttgcaccacaaaaacatttgtaaacagaattgtttaaaataattttgacataacatttgaaacatacggcatgattgcaatgaatcgaagtcacaaacgaggaatttacattctttgtatctttaaaagtggtaaagcaaatattgcacgaaacttcgatttcttcttcgggttgctgcgacgacaacgatggcggcggtgacgaaaacgatggtggcggcggtggtgatggcgtcgacgatcgcggcgccagctcctgcgtagtgttttggtcatcactaattaatatgatgtcctcttcaagcggatcatcattgctaacgttaacttgaccgtgcacgttatacgtaataccttgacgatggtatgtgcgcatcaacggctcgttaatatttccgatagtctgcaccacgatttcttgacgccgctctagattcctgggagtttcgggagatgatgtaaaattgatgcgtcgacgactcaacaagttgggaatgtggcgacggccgctgttgctgattcgtcggctcatgttaggcagttgactgtgaagcttgaactgtgtttacgagtaaaataacagcatatttatactgtttatcagctgcaaaatcagctgcaaaaatggtgggggtttccaagcaaaattcaacgaagtttgcaagcaaaattcaacttttttgtaatgcaaaaaagttgattgtgtagtagtatattgggagcatatagaacagtgtagactattctaataaaatagtctacgatttgtagactttgtactgtatataggggtgctggcgaacgtgactttttttgcattacaaaaaaattcatatctgatacgatctgttattcaagcgtgcctcctataaaagcaggcgctcgtcaactcgtaagcatagttcgttgtggagcgtacacgaagcaacatcgtaaagatgtccaacgttcaggactctttggcgtccaaccaaaacatccaggaatccaataatgttcaggattctttggcgtctaaccaaaacatcacattgcgatcatctgacctggaccctcccatgaacttcatagataactacaacagctcggacaccattgacagcattgacattgacacggaaacagataattatagtcgcgtgcgtaggcgacgtcgaaacctgctacaagctttaaaacgaaaacaagagaaaatgttggcggaatttaataatgagcctgtgattaacttaaagttcgaatgctgtgtgtgtttcgaaacttattatcaacaatctaacgagacatgtccatttttgattccgacttcgtgcaaccatgggttttgttttaaatgtgtaattgatttgcaaagcaacgcaataaatattccatattcaactatatgttgtccattgtgcaatgtccaaataaaaatgtggcgctcatgcaaacctgaaactgttgtgacttgcaagttttacaaaaaaactcaagaaaaagttccgcccgtacagcagtataaaaatattatgaaagtactacaagaacggaacgtgattaatatcgacgacggcaacaacagcggcgacgactacaacaatcaaataatggctttacaagctgaattgcaaaaagaaaaaaatcgcaccgatcaattgtcttttgaaaaccgacagttggtggcggaaaagaatcaattggtggcggaaaagaatcaattggtggcggaaaagaatcaattggtggcggaaaagaatcaattggtggcggaaaaaaatcaattaaatgagcaaattcaagagctgcaaaatcgggaggcggcaacattaacaacaccgcagcagtctaatattataattaatcaacaaattgatgatgatgaaactgcgccagctgagttgaacgagcgttttcgatctcttgtttattcgaatattgcagagctgttcattgaaaatcgtgttcaaagtattcaaaattatgtttacggaacttctgctactagttcatgcaatgtaactattgatgttaattttggatttgaggattttgaggattaatgttaaaaaaaatattgtaaataaaaggggatgtttttattaaataatatgttatattgtaaataaaaggtgaatgttttattaaataaataattaattaaatttatgtgagtttttaagaacttttaaatatggatagcaataattgtattaaaatagacgcaaaatacgatataccatcacattatcaatatgacaataacgtagataaagacatttcaatttcgtttgacgttgaccccaataaaacatttataattaatcataattatatacaacaagaacaaaatcacgaacaactacaagaggcggcaacatacaattcttgtataatcatttcttgatcatgcttacagtagaattctactcgtaaaaaacgagaaagccgatcagaaaaacaaattcccgaatcccatgattatgttttacgagtagaatcgaactcgtaaagcgagttcagttcaaaaaacaaatgacatcattattaccgagttcagaaaaacaaatgagtcatcccatgattatgttttacgagtagaatcgtactcgtaaagcgagttcagccgagttcagaaaaacaaatgagtcattcccatgattatgttttacgagtagaatcgtactctttaaaaaaaacaattcgatttaaaaaaacaaatgacatcatttcttgattatgttttacgagtagaatcgtactcgtaaagcgagttcagttcagaaaaacaaattagtcatcccatgatgcgagttcagccgagttcagaaaaacaaatgacatcatttcttgattatgttttacgagtagaatcgtactcgtaaagctagttcagccgagttcagaaaaacaaatgagtcatcacatgattatgttttacgagtagaatcgtactcgtaaagcgagttcagaaaaacaaatgacatcatttcttgattatgttttacgagtagaatcgaactagtaaagtgagttcatccgagttcataaaaacaaatgacatcatttcttgatactgagttcagaaaaacaaatgacatcatttcttgattatgttttacgagtagaatcgtgcttgtaaagcgagttcagtttagaaaaacaaattagtcatcccatgattatgttttacgagtagaattgtgctcgtaaagcgagttcaacggagttcagaaaaacaaattagtcacgagaattgtgctagtaaagatatttagttgcgttcatgaggtaagattaaaagcacgtgtaaagatgtttcccgagcgttggtacaattatttgcaatgcggtcaagttataaaaggttccaatttgatatgttttaaaacacctttgcggcccgaattgtttgcgtatgtaactagcgaagaagatgtgtggaccacaaaagagattgtgaaacaaaacccgagccttggggcgataatcgatttaaccaacacgtttaaacactatgacggtgtacattttttgcgagaaggtctactatacaaaaaaattaaagtccctggtcggactttgccgttgcagaatatgattcaagaatttattgacacagtaaaagaattcacagaaaagtgtcccggcatgttggtgggcgttcactgcacccacggcattaatcgcaccggttatttagtgtgcaagtatttaatacatactttgggtattgcgccgcaggaagccataaatagatttgaaaaagctagaggtcacaaaatcgagaacgccggttacctgcaggacttgcgggcggctaaaccagccgacgcagctacgatagtagattaaaactacaagtaatttaacatgtatttattaataaacggttagttgtgcaacaatgttttattctgtcttcaaatgacgccttcctccgtctccccgaacacgtctagcggatggaaacacgatccgcacgcggtgcacaggtagcgcgcaatggggaacgatgttttcttgtattcccgagtcaagcgcagcgcgtattttaacaaaccggttatcttgtaagttagtttcatttaatgcaactttatccaataatatattatgtatcgtacgtcgagaattacgtcgagaattaacaacgctcccgttgtctcatctcaaaccgattatgatagagatcaaataaagcgtgaaataaatagtttgcgacgcaacgtgcacgatttgtgtacgcgttccggcacgagctttgattgtaataagtttttacgcagcgatgacatgagctccgtagtgacgacgatcgcgcccaaaaaaacaattacagagtatgttggcgacaagacattgttagttgaatcggcgccgcttgtgcgagatgtcgaaaaatatggcaactgcgtcgtatagtgtgtggagtcctctcatcactgcgtcatgtttagacaaaaaggctacatatttaattgatcccgatgattttattgataaactgactttaactccgtataccgtattctacaatggaggagttttggtcaaaatttccggactgagactgttcatgctgttaacggctgcgcccattgaaaacgaaataaaaaattacaattttaaaaaacgaagcaagaaaaatatttgtatgaaagaatgcaacaatgtcgtcgatatgctcaacagcaaaattgatccgccgccgtgtataagaaaaatattgcgtgatttgaaagacagcaatgaaccgcgcggcggaatgtacagaaagagatttatactaaattgttacattgcaaacgtggtgtcgtgtgtcaaatgtcaaaaccgatgtttaatcaacgctttgacagatttttacaaccacgactccaaatgtgtaggagaagttattcatctttttatcaaatcccaaaatgtatataaaccaccaaactgccaaaaaatgaaaactatcgacaaactttgtccgtttaatggcaagtgtaagggtctcaatcctatttgtaattattaaacaataaaacgattataaatgttaaatttgtttttattacattcctcgcaagtaaataagtattttactgttttcgtaacagttttgtaattaaaaaacctataaa

SEQ ID NO: 6 - DNA, 131160 bp, Choristoneura fumiferana defective nucleopolyhedrovirus
ttagtacgcggggccagtgaacagcggcgcgtcaggcgcaaactccttcactttgaacacgagcgagacttcaataagaatctcttcttcctcgcccgagtcagtgccaatgtacacgatgggtttgtaaaagttttcccagattacgcggttgacaaaggactcaaacgagttggtgtactcgctgtggatgttcatgatggggcagccaccgcctttcttggctaggctaattctgtactcgttgttcatgcccacgtaggaaggctccacaatgcggattacttcgtggggcacgtaatcgcagtcccagcggagagcgtgttgcgccaggaatttgtagcaacggttagggcgagttgggcgcaggttaatgactaaaaacacgtccatcacctcctggtcgtttacaatggggaaactgtcttcaacgaaacgagtccaagtttcgcgcagaaactctttaccgctccagttaacaatgagcttcatcgtgtcgggttttacgttgcggatttctttaaaaagggttagtttttggtttttgccgggtcctaagaagggatcctcagcgaccatgtaatggtctagggggtcaagatgcttttcatcctcctcatgttcgagcaggtgcttcttgcgcttggcgttcttgatgacagatcccaagtttttgtaatacttgttatcatacacatacgtgcgaccaatggtcggcctatacgaatagtttggcatagttataacaaattttattacaaagttgctacaataacagcaaaatacttattatctatttaaagtgtaaataaaatacaaaattatatttaaaaagcatttttattatttaacaaacaatcttgcttgagctgcaacttgtagatgcggtccacaatttctttgttgcggtcaatgtcttcaagctgctgctgactaagcgtagaccagcgcccgtcatcggcgcaataaggcgcggctttagcttgcatcgccatacggtctgctgccaattcaacccgtttcagtgccgcactttcagcgcgctcttcggcctgttttttctttttacacgacgtttcaatctgcttgttcatgtgcgcgcccacaaatcgctccaaatcgtacaagcactccaaatcggcctggttttccaagctcgcgcccgttttggagctccatcggtaaaacaatcgcaaaatcctgttggtggagtcggccatgttgtgcgagcgtcgtacgcttactactaaaaattacaaatggggtttttgcctttgcacatgcccgcttttggacacaatttattgaccgtcttcatttttgcacaattagacggcttgtacacgtcttccgccttgatcagcaaatgcgtcacttcgcccacgcacttagggtccattttgtaaaaatgcaaaagcgcgccgattaaacacgcgcttttgcattttgtgcacgacaccacgttgcccaaatagcaggtaaactcgaagcgcttccggtacattccgccgcgcggcgccgacgcgttgttcaattcggccattattttaaccatgcacagaggcatgcgcaaagagttcaatgccttggccaaatttaccgacccgtcggcgcacgcctttaaacaaacgttgcgtttactgcgatgcaaaacggcacgtttgggctcggtcggtttcggcgcggtcagcaacgcgcgcaatcttagtcccgacatttccatgaacaacccttgtttgaacacagtgcacggagacaacgccaacacgcccacaaaatcgttagggtcaattagatacttttcactgttttgcaaactgcttacgcctgcggcagggttccacattgcggaacccatgtttataccttgtcacacaccaaagcagactggcccaccgttgccgccgaatttttaataatcacgggcgatttagtaatgacgtcgtttgacgacgacgacaattccaaaatccggttacaatcaaacccggtcgttgaccgcgtgcacagctcgtgcacgctgcggcgcagactatttaggtcgcgccttatttgctcacggtcgtagtcgtgatttgaaacgatcacgggcgcgttggctgtcctcatcattgggcggttcatatttatatattattgagtaaagttgcattaacaaatataacttaatatggcgagcgcgcgcttcatcaagtttagtttgcgcgttacgcaagggttcaaagaaaacattgttgcggacattacccatttggcgcgattgcgcgcgttgattgacgggaaagtgacgcacacggatgtgcatcgttttgggttcctcgaccgcaacgcgctcgtggaggcgtgcatggccgtaaacgtgcaagtgtacgtacccgacggcacaatccgtctgaatcccaaaactatttattttagagtttgccagaagtgtcacgcggtggccgacgtgcccgcgcccgacgaccactctatcgcgcgctatttatgcgccgcgtgcggcatggtgctggtcatcgaccacccgctagacgtgtttggtgacacggaagaaggcgtcaacgagctgattgaggtgcagcgcattaacgcaggtggcgacctttagtcttttgcacaaacgtcaattaaataacacgcgtcaccatggcccaaataaaaatcggacaatttaaatttggcgaggacgtgtttacgttgcggtacgtgttagatcgagatattgtaaagtttgtggccaaggacgttgcgagttctttaaaatataatatttgtgataaagcaatacgtactcatgtggacgacaaatataaaacatcatttgagcagaccatccaacttggggggtctacctcaaccaaccttgtaaagaggggcgacccactgtacctgcaaccacacacagtgctaataaccaagtccggcgtgattcaactgattatgaagagcaagctgccttacgccgtggaattacaagaatggttgctcgaagaagttattccgcaagtgctttgcaccggcaagtacaatcctgccatcaagcagcagcaagaagaaaacaaacaattgattaacaaactggtcaaaacgtttagcgatcacacaaacacgttgcaaacggcgttacttcaaaaaacccaagaattggttaaaaaacaagagtttattgaacgcattgttgcgactaaagataaacagattgaggctaaggacctgcaggtgacacgcgtgatgacagacctgaaccgcatgtacaatggtttccaggaaaccatgcagaaaaaggatgagattatgcagcaaaaagacgcgcaagtaaccgatttagtagccaaagtgattgacctgtcgggccgcgcggtgcaatacccggaagacgagcgcaaacaccctgtgttgtgcgtgacgcgcgacggtaccacgtttacggccatcgccgggcaaaaggcttacgtgcacaatcaaaaattgaaacgcaacctcagcgcggccgacattgtggcggaaacaacacgacccaaccccacggtcgattggaacaacgcaacgcaccggttggcggctaaaaagagcaagcgtactattagctttgactcggaacaagacgcgcaacagtttgcgactcgaataaaacaattgttaaataattttgattaatatttattgataataataaaaactatttttaacctacgtgtatctttaatttattgtttacaaatctataagtacacctgctggataggaaacgcacaaaatgatcgcttaaagcgacgtttcgtttgttgtttacaaagcgcagcgctttttcgtacgacacttgccactttttcatgtagtagtacaccgctaatgttgccgatctagaaactccagcgtggcaatgaatcaaaatctttttgccttcatttattcttcgctctatgtaatcgtacaaagcgtccatcgcgtttattagtgccatgcatgtaggctcgtcttcgcaataaacgtgaatgtgataaccggcgggcaaaccaagcgcttgcctgatggggccaacgtccgaatcaattaacgagatgacgctttcaatgtcgtgtttcttaataaactgtaacatggcttcgttgtttccatagtatccgcccacaaacaggttttcgtcaatttggttagcgtcgtacatggcgcttcagcaagtcttctaaataattgcgtctttcaattttgtgtccgcgcgctgcttcaaaacgtgcaattgcgtcggtcggcgacacgtgcagtttatctattatataacgacacactaaatagccggtgcggttaaggccgtgcgtgcaatgcacgccgattaacatgcccggacaccgagcgctaaattcctgtacagaatcaaaaaattcctgtacaatgtcttcgtttggcacttcttgccccggaactctaatctttttgtaaagtacacccgcgtcgcgcaccttcgcgccgtcgtaataacgtaacgtgtttgttaaatcaatcacggcacccaacgcgcgttgcctattcaccaaattggaaaccgtccaacgatcctcgtcgttggtcacgtattcaaacacttcctgtttcaatggcactttaaaacaaatgaggttagtgccttcgataactttaccgcacgtggtgtaattgtgccagcgtccgggaaacattgcacgcgtgtcttatttagcgtcgacgttcgcgcgtctcaacttgtaaccgtacactgcttttcagtttgcaattatatatgcccgcgttatctatccccactctacttgcttttcaagtataaacgttggcgtaaatcaagtttaacaaacttgcgtttcatagaggggcgtactggaaaaccgcgtttgcttgggtatatatacgctaacttgcaacgctgtatttacagttaacaaagcctcactagcagcaacatgtctctgtgctctcaacttcttgtgtacgcttactacggcgaatacaatatgccgcacgaacgttacagcgaatcataccacttgtacaggattgtaaacgaataccttatcaactcgtacgcaaacgagacgtcgtgcgtgcgccgcgacattgagacggcgcgtcgacttaacagaggcgagctttcttttgatgacgcgcgccgacaattaaacttggaagaaatcgccaagcgtttagccacgtggtatcacactggagaaatgaaaagtttttgctcagaaatacaaagcgttcttgccgaaataaattgccacgcgccgctcgaaacgcgcggcgcaagccgggttcaagcattttttgcgctagactcgctcgagtttccgcccaacatgacagacagcttgcaagtgctgatgggccggtttatgcattttgtgcgcggttacgcgttaacgcacgtcgccaatgtctttgatcccacaattaaattggacggatggtggtataacaagttttgcgtgctcacgtacatgtaccgaataatacgcggcaccgtgcccgcagagctgattacgcgtttgcaaaacgtggtcaccaaatacatcaaaccagaatatgatgagagcaataacgcgctcgcaatgggagacgtgtatggccgtttttgcggcattggcaaagaccattttgcccaacacaagatgaggagcgtttacatttttttccagtacatgcgaggcgaagtgacgtacgcggacgaacgatttccatgtttcagcgtaatcaaggattttgggaggcaatgcaaagaaacctataaagatatacaattgcaagttgatatacttcattctcacgccatgacagataaacaaaaaaatgcgctatttgacttgttgtgttgcaataacgcatcggacattgacgtggattgttacgattatattgtaaaaaaattttataatattgctgtttattaaataaaatatattaaatgtttttagttttttatttttaattattacgcatgttaagcctagcaatctgacgctcagtcatggtagagttaatcacttccatcagctggtccttggtgtagttttccagcagcgtaatttttgttgtgcttagcaaaattgttacgggggtatggattctttgaccttgttcaggacgttcatagaattgggcacgtagtcgcttgctttttggctgcactaatgttgaagtctcaccgatttgatgagacttaattttttcgtacgtcgtttggtttttgctcgctgacaaacttggccacagcgttgggggcgctcacggtaatccaaaacccgagcaaacgggttagccagcatccacaaatgcccgtcaacgtcctccaccttagtcacctccaagatttaattttcaaatcgggtttttacgacggaagacatggcgacggcgttcagatcggcggttgaatgtgaactgaccggcgatgacgcacgtctaaaaataacgtactagttttacacgaacgattgtacttgaaaagcaaggtcatagccggacacgcttttcaagattgattgtactcgtaaagcgaggtcatcaatggcgcaaatataaaaataacacacttgttttacaagaacaatcgtactcgaaaagcaaagccatcgatgagtcataaccggacacgcttttcgatatcgactgtgctcgtaaagcgaggtcaacgctgacgcatgtctaaaaatagcacacttagttttacacaaacgatggtactcgaaaagctagttgatgaggccgcgcacgtcattataccttattcgcgatcgggtgtccaaaaagaaccgatgcgtgggttcgtcaagtccgttgcctgacaacggatatgaaccgggcacctcaaacgcaaacgctgcgtccgtgttgctatcgaacgtgtcgctggggcacagcagtttgttgtttgaaaaattacctatagacgtgtacgtgttcacgcattcaacgcggaacctgtgcgaagcggtggtcgtgtcaagaccgtccacgatgctggcgcacacggacgagcggtcgccgggcacaacgtggcgcacgcgcgtcacggcctcgtcgccgcaatcgcattcacccgtctcgaaattgggacgcacgctcgtgtgcacgtaatttacgttggtgcacacgttgggcaaacattccaatggatttagcggatttacaaacatgagattattgttgttatcgcgcgcgttgcagcgcatttcgaaccggcgcgtgccgtcttccaataactcatcccagctacgcctaaacgtgttggtggcaacgttgacctcgcgacctaacaaccggtcaaacaacacgttgcggtcgctttgcccgggcaggatgcggtcaaagtgctggcgccccgccagttgagtcatgttgctggtgccggcaaaatagcgtgggtcttcagcgatgcatgtccattggtttaaactcatgagcacaacgcttgtttcgcgattgcaatcgcgaggcacgctgtttgtggtgcaatagccgcccaccgcaagcttgtgcccgttgaccacgtaagtgtcaccctcgcctacgaaaaaataagatgcaccagggtcttcgcacacttgagtgcaatcaaaaaagggcaaatcaatttcggtaacgtacaagggtacggacatgcatttcagagtttcgccggccagcgtgcccagattagtatcaaattgcaccgaaggcaacgcttccatgggcacgtaatgcctgcggcgcatgactgattcaatgtaatccatcctatcggtcaaagtgtcattgtaatcgtgttgggcggtctgtatgtgctggtaagcttgataaaagggccaaaccactatataaagcagcgcaaacagaaaaagcacaatcagtattcgatacatgttgccaatacttagtagttttaaacatgttggctcaaattaattatattctgcaactagtgctgcacgcggcgttgtacacaatcacattaatcgcgtttgtgttctcgctcatgggaacaataaattacaagtacgcgtttttgctcgagttgaacgacaatggacattctgtaataaatctttcggtgctgacggcgttcctgctcggcccgtgcgtgttcaccaccaccacatgggccatatacaaatttttgttgtgttataaacgcgcggagatgcatagcaatttttacatgaagaccatcatttcgttagcccacgtgatggcgttagtttgctggacactttttgtggtgtttcaacctcaaatttacaaaaacggacatgttcccgtactggacgcaaggtaccgagattacgatcgtaattcgttgtgctggagcaacattgtgtcggacacatatgaagtacacgacacaaacgcaatacgcaccgattttaattgtgtatacagacacgattttgttaaaaaatgcgtagggtgcagaatggaagtacggcacgacgagcccaccgtgtttaaccagaatcaatgcgcgctgattatgatggtaatgatgacggccgtgttgcaattttggaacatgtacgtgcaaaggaaagagatgcgctacaaacctacgcccgtcaaaacgctttattttgagagtgcgccgttaaaagaacaagataccgcagacgaagaggaagaacagcagagcagttttagaatgttggagattattagcgagccgcgggtgcaatttcagtttcccgagtctagctctttggacagattgtcatcgccacctccaattgtgcaatcatcatcgtcacctaattcgccagacagtggaattgattatgacattcctcaacctttttacagcgtccctaacaaagttgtatgtaaatacctgtgccgcacccatgcaaccctatgcgcctaacaaccttagtcccaccgccttttttaaatttaaatttttagtattataatttgtattttttgtacttaaagtattatgtatagtatttactagtttgtaagaaagagaatatgtaaccgataccaaataaaattaaaccaaatttaatattaataatatttttttattaatacttccaacacgcggtttagcaattgatgttgcacggtgtatccatcaccgtgcacaatgcaaaagttaaccaacccgtttagcactaaacttttgttaaacacgttgcgttctagcgtaacgataaaatcaaacaagtgcaacagcgttggccatgcaaccctgttgcccgttacagttgtgatggcaaacgcgatggcacgttcacaataaacgtcgtggcttgccatggcaaaccttgagacggcttgttgcgcgcgcgcagttgtccaatcaacacgtgttctttgcatattaatattattttatcatggatcgcgtagcagaccaaatttactcgggcatgttgccttacattaccacaagggacattgaagattgtctgcgaaaccgcatcgccgccaaagcgggtgcgcaatttttcaagaattgttttgaagccgtaatggcggacaagagcgggttgtttgtgctcaacggcggggctgccgccgcttgtcacgttgacgaacagcgtgacatgctaaaatgtcttgattttgactattacaattcaagcaaaaaatgcattcaactagccagcatgcagcgtcgcttgcaagcgtgcacgcaaagtgtttttaaaaacttgacacgtttaaccaacagcgttcgaatgcaaagttatttgaccgtaatgaaatgttttcaaaatggtgcgtttcgttttaatgataacgtgcacctgcacttgttgccgcatgttgagattgtgcgcacaagttttaatgaagagtttgacctgatcaggtttgcgctgcaagttgaaatgtggtctgaagacggtgttgaagaatatgtagaccaaaaatggattatgaacagggacgcggtgacattcaacgtgtattttgtaaacgtgcgcgtcatcaaactgccgttttttggggaacactgcactagatatttcaacctgtttggttatcacgtgtttgtgtcgccgttgcatcgagttttaaacgatcaaatcatgtgtttgttaaaagacatttttacaaacaaagcggattttaaagtgcagcgtcgcgtaactttgattcgcgccctctttgaaaaactgccgtatagttacgtgtgcgacgacgtggcaatcgacaggcatcgcaacgagagcatcaccagcttttgcaaaaaaactttggatatttacggaccggcgctgggctgtcacaagctggtgtacgcgtttttacggtccgacgcgtttgtcaaccaaattccccattacgtggccgaccattttaatcacccgttgagttggcacaattgtgagcaaaagtggagagagtttatggcggttatttgtttgttataatataataaaaacacatgtattaataataataaattgtttattttaaatattacaacgtatttttatttacattagttaaatttaaaaataaataatacagttaacaattgtttacccgtcacatagttaattgcaggaacccatttagaaacattggcgcttctagcgctaatatcagttttatctacattaataaattttactacattattaactaaatcagattcatatttatcatcatcgttatcattaaaaattaaccttcttagcgcgctccacactccttttaaataagcctcgttaataaatactttggccaccgtttcgtggcgttcgatggcgtgcaccgcatcgcgcacgcgtcggccagcacttccagcagaaaaaagcggtccaacaacaaatggcaccgtggcgccttcgtcgtcgtgcttagcaaaaccatcaaaattgatctctttttgaccgtgcgcattgatcacgcacacgctgtcgtaacggctgcacacggtgacttgcaagtaatcgttattaaaattagtaactgagattaatactttgaatttggcaaacggcgatcggcattttacgtttaggcaaaattcggcatcggcgctaaccgccgtcaatttgaagcgctcaatctgcttcggctcttcaacaccacacaaattaatgggcacgagcgttaccgtcaaatccatcatgtagcacttgctgtgctataagctttgcgcttactattttgtccgcttccacaatttcaaaacgtttgttggctgcgcgtgccaccacgcccgatcccaacgaagtctcaagcgcttttgcaatgcgttcgcggtcgcgtatacagttttttctgcgcgcacaaaacacttgctcccctccagcggcgctgacgtccgctacgcgctgacgcacaaactgctcggaaccactcattgttaacaaaacatttttgctcaacattacggcaaaatgtttgttgccacgagcgcgttccgcgtgttttttgtccagttgcgcggccaaattggcaatgatattgttctttttgcgcacaagtttttgcatgtttttaacacgccgtttttgcagctgcgtcaattttgtaaagtcgagccgtgttttttgcagttgcgcaatcacttgtgcaatcctgtcctggtgttcttgattaaccaagctcttttccgatgttgtcgacacagttgtggtggtgacgacggtctttacaaaagtggacgactggatagcaccgagctcggcggcgcgtttaggagagacaatcgggcctggcagcattttcggcgtttccatgtgtctgatcgcggtgatgttgcgcctttgaatgcttgtttgacaataatgacccgctttgaaggtgagcgtttataaaggctggaagtgcgcagtcgcaaggcggggcaaaaaaaaccaatgtttgcgtatatacatgtatttattaaagtgatttaccctgtaattatgaattattacaatggaaagcgtacaaaataatctgaataatctgtgttggcggatggtgatttcagcgaacactccgaccgagtgatgtcatggccgaatcgaattacgcgttccgtgaatttgatagctttatcggcaggcgtggcttcgtcgaaggccacaacgttgagcaaattagtcatgcgcaattgatacgccagtcggtcggcaatcacgtcgccgaccgcaagtgcgagttgcgctgcagaaacggtgacggtgtttaaagcgcgtgccactccaaattgctccaatttggccgagtggtgaaattgatcgcccatcataggcaggcacaccataggcacgcgcgcatgtaacgcttcatcgctggattgtaggccgccttgtgtaacaaacgccacaacgttgcggtggttaaggacggcgcgttgattaaaccatttttgggcaattacgttgcgaggcaacaccacggactttgccacagcgtcgtccaccttccatagcacggtgcggttgtccagtttggcaaacgtgtccaaaagcatttgcaaaaactcggcgtggatggaattggtgtcaatactggatccaaagctgacgtacactgtcccgttgacggacgcgttaaggcgtttttcaagctcaatatctaagcgttgtggcggctcgagtgtcaagtgcaatcctccgcccaaatattgcacgctaggcggcaccggccgattgttatcgtacacggggtgtaggttaagcaacagcaactgcacgttgttgcgcaattgccgtatagtgggcgtgttggggccaaattgcagtttgagcagcgcgtcggaacggcgcgccaacagttcaaactcgttgtacagacgccattcgattagcgctccgtccgcgttgccgatcgagctactgcgccaaatgttggggtaatggaccgggtggcgtcccacagcgccaacggcgtcaaagttttcggccaggccgtagcccggcgcaatctggatcacgggcgcggggcgaaacaggtggccgaacacgagcgcataatcggcaaacgcctctaccactacaacgtcaaaggtgcggtttgtggccaagaaactgcgcacgtgggcgttgtcaaattggtcgcgaaacatttccactaaccccatgtaattctccgccgtgacggtggtttcgtcggacacgacaccgcgtttgcgaaacgcgcccgaacttgccaccagttttttgtattgctgcgaagacatgtccgcgtcgatctgctcgatacgaccgcagcgttgtttgtttgccgcagcgtagtcaagaagttgcggctttaccacggtcacgttgtggcacttgtctgccaaagcttgcacgtacgcttggtacaccaggtgatggctataggccggcgtgggtagcaccgccagaatatttgcggtttgcgctccgcccactgctaacagcgttgttaataaaataaaaatcattgtaagtgcagttaagtgctgtgctcttaaaacagtgtgtgcagttagtagccgtgaccccgtttttatagacgccctacatggsstcgtttaagtacattaatgtggaccaaatgtggaacgcgatcgcgtacaacgacagtcgcaagtttgctttcatgaccactcagggacgttggattcacgccgaccgtcactttaatagcgcggcgcaactgttgacctacatgatcagcaattcggtgaacgacgtgcacgtaaaaccgttggacgaaggcggacgtgaatgggtgattgacgccgattttaaagattgcgccaacaaggctgagctagagttgaaaataaacgtgggcgcgaccgcgttgttgctattttttgccgacaaagaagacgccgtgcagcgcgtcatgttcagcggcaaccgtgggtttcatatgtggctaaagttttgcggcagatttagaatggactcgccaaagaacgtgcgcgagcactggtttgaagtgtttaaaaaacccaacaaattggctaaaggggacattcgccccggtaattttgcttttagcgttcagcaggcggtaaacatgtacatggaccaaatgcctagcggcagcgacgtgtgcgatttaatagtgcgctattggcccgacgtggatcgggacgtgttttgcaatcccaacaaacaaattcgcgcgccgttcagttataattataagggcggtgagttttcgcgctgtttaactcagcaattgctacagcacattacaaaatgttcgagtgggtgtttggatggtggagcggaagcaacggcgacgagcagcagcagcttgtagaatttgacgaacaagcctacaagcggtatgcggtggaccgtcgggcgcattcagacttggttcgctgggacgtgtttcgttgtcacccgtttacattcaggtttcgttacgtggtggacgacaacaatgggcgttgctgcagtgtggttgatttttgtaaaggcttagaaattagccacgatttattgctgagttgcaatttaaaccgtcaacatgtttttcaattaaatgaaattgtacttggcgcaccacctaccgactttaacgccgactctttgggcagcttgtttgccaccaagcatggtctgattcaattgctgcagcaattaccgtttaataacaagaccgacgtgttgatggccattaaaacagacaagggttacgaccacgacgatgtgcgcgacaaaattgaaactgtattgaaacacatcaaagcactcaacgccaacagcgacaagtttatcagcgcgcacaaatcgtttaagcttgacgtaaacgcccgttttaagcaaatggagcagcgttttgaaaacttggacaatagattaaattctatttcgcacgagcgcaccaccccatcaattgcgataccgggcgtcgtgtttcctcgcgacgtgaccaaacacgaacatttggccgtgtttatgaacagggtggatgacggtactcagattgcgtttgcgcgcggtcagcaagaacattttcgcaaacgcaaactaaagtttgaagacacaatggacattatgtttgaaggcgtacacccaaacccagtcatggcggttaaccgcattaaagaggagctgtatggcagcggacacaaaatgaaaaaactacggaatcacgtcttagaagtaaaatgtacagtagacaccgctaaggacattgtaaaaaaggctattttataaaataaaaagtttatataagtaaatgattattattattattactattatgaaccctaacaataatggcaattattatatggacacgggcgatgaaaacgttacatacattcctgttaaagtaaagtcaaactcaaatgtttttgacgacaccgacattataagttcgttccgaacaaaacgcaccgcccgtgtattatgcctataaatgtatgcctatacaatttcctttgagtcttagaggtactcaatacgaggcaaatagtaatcttccgcctgtacaaaaaactcctttgccaaaacaattatatagcaccaaaggattaaatgagtatgatgcgcgtggagtggccacgtcaacaatcgtgccgagtcctcaaaaaattagtagaagcgtagatttgccaaaacaaaaattaggacctcaatttgacctcgataaaaatttaaattttgcggccgtaaggccccaagtatctacaaccagttcatcaacaactaataataacacagaactaattcaactcacaatagataacgatcttgttcacggtcgcattaatgaggcacaggccaacgttttaagaaacaacttaatatgatgaccttgttttacaagtacaaatgtacttgtaaaaaaatataaatcatggctttgttttaaattgtaatcatgaatcattacgtgcgtcattgctgaccttaattttacaagtacaaccgtactggtaaaacgatatgtatacgtgcgtccattgttgaccttgttttacaagtacataccagatgtatacgtgcgtcattgttgaccttgttttacaagtacaatcatacttgtaaactaatatctatttttagacatgcgtaattaataatcttgttttacaagtacgatcgtacttgtaatctttataaattttattgtgcattgttatcggcttatggcgatatttatttaagttgtgcgtcatagactggtatataagcgagcgcgttggcttgcaaattcagttgtgtgcagactaggcaccatgtattgtttattaatttgctccgcgctaattattagcggttttgctgatccgatcagctttaagcctatcgacgacgccaccgggcttatgttcgagcgcatagcttctttgcgccacgtttccgaagaacgatttttgtttgtaaaagctttggactacagccctctgctacatgaattaaaaagcatagcaaattttttgcgcgacgacgttcgcaacaacgctacgggatgtccgctggtgaagcttatcaagcccggaaagccacgcgcaactatgaatcgtataagcaaggatttgtcctcgctgccgcagctggacgcaacattttataaatttgacctggacgactccatgagcaatgaagtaacgaacgatgtcgtttttgattacgttgaccacaggcaacaggacgcggactacgccgacacgcataacccacctcattggagcgaagtgagtgttatggatgtgcgcgcattgatgcgcggcggctcgactaatcgcggaaaagttttagccgcagtgtctaccgccaacgtgacggataacttttcaaagtacataacttgcatggacggaaaccgaaccgcagataacaattgcatgtatttgaatgacatgcacaaaatgatgagttacaagcttgctgacggcaccgcgtttgccaacacgctggatagatttattaaacaaacacgtcgcaacaaattaaacaacaccaacaacgtgtttgatgacaccgcgttgctgcacgagatgcgccaattaattaggatgttaaccagccaaaatttgagttgggttgtggattttgaacgcactatgaactcgcattttgacctctcccaagcgtacaagctgcacttgtttgcggacgggaacattgttgtgctgtgtatcaccatgccgctcatgaaacgtgttacctcgatttatagcttgtatcgcatcgcgacggtgcctttttgtcgaggcaccatgtgcctgatgatggtgccctcagcgagccacattgccgtcaccagcacgcgcaactattatacgattgtgcccgacaattatcgcacattgtgcaaagagtttacaggctacgacgaatttttatgtcctgcaagtgaacgcattgccacattaaactcgggcgtgtgcgaaattgaaatgtttatgggtcgttatgcgcaggacattgacgcgctgtgcgacgtgcgcgtcgcagataatggcgccaaacaagtgttactagatatgcttgttcatagccgtaaatggttgtacgcgtttgcgcgcaatgccactgtttcttacgtgtgcggtgacacgtatcaggaatttgccacggccgtatcgcagggtgtggggctggtggtggtgcagccgttgcaatcgtgttcggtgcgcgttaacgagggcgcgcttatgtttacagcaaatactgaacattacgtcaccgcctcaacatcatactggccaagccgccgctttgattacaacaagtatgtggacgcttcgttgctgagccagacttccacggcgtttgcggacgcagtaaaaaaccttagccttacgcaacttagaacattgcgctcaaggtttcacatccgcgattacacgacagcacccaaaaatttttttgcactccggaacgacgtgcacgcgccgcaaatagttgataagagcattgatttgacctatgtaataattattgttttggtggcaggtattgttggcgtcgtgtcaagcgtcgggtattgcgtttttaaacgacatcgcaacaatcttagaaatgttccgtttgctgtgtcgtttaaaaatgaagaactgcaacccataattacaattggtaacgacacgcacaacaacttgcacattaaactgcccaacaacactgtgcacacaacttctatgggaatgtttccaatggaaattaagcaaatcaataataaaattatgtaataaatcaataatcatgtattaattttgtgttttatttattacctttcaacatttagcgttagtgtcagtagacgttcgcacgcgttccgtaagtggtgatatgcaaaatgcgtaactccgcaggcctgtttatgatcatggagccggacaaggcggtgttgctgtgtgcgcgtcgttcgtactgcggcgccgcgtccgttaacacggacacgtttttagaaaaaatatccataccgcgcgggcatcgcgactgcacggacgccaaaatctacgagacggcagtgcgcgaatttgtcgaagaaacaggtcggttttttcacagcgcgttcatttacaagtttccgttcacgttgcattggacggacaaaggtgttacctacaagtattccatctatgttggcatagtgcgcggctgtgccgacgtcaagtttaagcccaacacgtacaacgtcaagttgttgccgggagcttttggttacgattaccgcatcgtgttgcgaccgcgccgtttcaattgcgagattgcccgcagcgtgaccatagttccgcttcatcagtatttggagtacatgacaagcaagcagctaaacacgtacgcttctagcaattacaccgagttttttaactttgtacggcaagttaaagagctgtttgacaacaagcaactgcacgattttttctatgcatccctcaaacgcgtcgaagtcgcatgaacattgacgccaagtcggctgcgcgcgaccagaacgctgattgttttacgccgcagaggctgtacgcgttgtggggcgaaacggtgaacacgctgaagcgcacctttcaaatcaaaaacgtgcacgcacatatacttgaagataacgcaggcaacgtaaaagattatataagagaaaatttgagccgttttacagtaattaccggcaaatgttccaagcgtaaggtgtgccaccaccacagacgggtcgcaaggacattaaacctcaaaaataatttagtagacgaatacacctgttcagtgacggacgtgtaccagacaccaagatggtcaatatgccagaaaccgtgcgcgacgagtcattcgccagcaacaacgccttgttaatcaacaaattggaaaatagcgcgtttaacaaatgcaatttggattatttaaaaacttgcatcaattatttggaaaagaaaaacatcaactacaccgttgccgtgttgccgtgctctggcgatgatcgcaaaactgtaaagcgtcctaaacgagtgagtaaccacaacatgtacattctgtttaatagtttctacactaagattcgcaggcccgaatggcccaacagccctgtcatgtgggacacggtcaaagctcaaaaggaattgacagattttgttatgctgtttgaccacacgcaaaagctcggcaaaaacatcacaagccgctctgcgtccacttcttcaacggaaacggcgccaggcaaacgaaggcgttctgtgcccgccgccaacccgtctgaaatgcaagaaaattgcgaactgcgcgacaagctgtacgccgaattttacagcgtgctcaatgaaacctttaaaaacagcgttgcgcccgctaccagcagcatctacgacaacctagtcacaagagagtttgtcaccaaaaacatggaattgtttaaaagcgttgcgttaaaattaccttcaaccagctacgtgcctacacctgttagcaagaaacgacgagctgtacccggtgctcccaaaaagattgccgccaagcaacgccgcgacacaaagcctccgccgcccgtttacgccagtgacaaaacgcaagacaccaacatgtctgaataaaacatgtgtttaatttaataaattttattataaaatttaaatatattttatcattttcctcctcgtaacctcaacaccaaatgtagtgtagattctttttgtatgttgtaatcgcccatagttttagaatcttccaattgtttgcccgcataaataagcctctgttgatcgacgggcacgccttctttgtcggcaattttttgtttcacctggccaacagaatcgccaggttccgtttccacggtaatggttttgccggtcaacgttttgacaaaaatttgcatttttaaactcttataaatgacaaaagtactggttaaaacgccgcctttatacggcggttgtttgcaacagcaaatagcaaaactggcccaagcgcgagtgcagcgcaattacgaacgtgacattggtcagttggcgaaagagttgaaagaacgtggtgtaccacgcggacatttaggcgatgtgctggagtttatgggtcgtcaaagcgagctgttgcccgacctagtaaaaaatgacgaagattttcgactcgtacaacaacgcgaccttggtcaaaacactatagattatttaaattatttgcaacatgacaaacttttttactgccgtctttgttacacgcacgccgactggttgtggtgcgagtttcacaaagcgcacgcgtaccgaggacctcgcgacatgaccgtcgacgcgtacgtggaacattttaacagcgacatgggcgtggtggcgctcgttgaagagtactaccattgtttgtcatcgtctaatgataaacttgaagccaaacgcgttcttatgacgttaacgacctttgagtcgctcaacgacctattgggcagtcacaattattccgccgaaaacgcggacacgtccacctacgagcttatggattttgaataataatgtggactttgcaattgcccggcttgttggtgtgcgcgaaacacgaccccgcacgcattaaaattgcggcttttgacctggatggcacgttgatcgttaccgcatctggcgcgcggtttccaaaaaaccgcgacgactggcgtctgctgcctgcggcgcgcgttttgccgcgcttgcacgcaaacgggtttgacgtagtagtgtttactaaccaggcaaatttagcgtcgggtaaactaaaacctgaagacttgctacacaagttaaaggccgttcaggcgtttataaacgtccccatgtcgttttacgtggcttcgcacaaggacacagtgtaccgcaaaccgcacgcgggcatgtggcataaaatgcttgacatgtttgcgcacgtggatgcttcgcagagtttttacgtgggcgacgctgcgggccgcgtgtcaccaaaacggtgcgactttagtgattcggatctacagtttgctaaaaatgttggtgtgcacttttacacgcccgaacagtttgcgcagctagatatctgttgtgattagataacaaactgagtataaaaggagcgcatccgctgcacatattcaaaacgcatcatgcatcgctttactctagtcgtggcggctgtggcctctttgtgcgcctgtcggcaattggaacacattaccggcacgcagcgacttgtgcatatatttgtgcacaaccgttatttggcagttcacacagacggcgttgtcaacggcaccctgtacccgtacagtttgaacaccgtattgcaacgcgtcagtcactttgaacacccagcgcgtcgaactattttgttgcgcaacgccatttcctgcatgcacgtgtgtttggatagatgcggtgttatgtacgcttctgccgttctgtccagcgattgttttttacaagaaactgtagttaaaaacaattatgatgtaatgttcaagatttacaatcgcaaattgacctatgtagctttggacaattttggaaaagcgcgccgcttgcagttgtcaagacgcagaacactgggcaacttgagcacgtacgcgttaatattgcgcataccgttaaattataccagcgtttcgcagtgtcctaaacaaaataaaattgttaaacatcgcaaatgtagtttgccctaaattgtatacttttgtgtattaataaatgtgttacaaatataatttttttttaatttataagtaccctttaaaaaaatatgcaacctctttgcttgccgacactttaaacatggcaaacgaacgctttactcaaagctttgtaacaaagccaactgtgttatagcgatcgtgctttttaagtacgatcaatcataaaaaacgtgttttatttttagcgatacgtaaaaagttttgtaaatgaaggccatttgcattattagtggagacgtgcacggagaagtgcactttgagcagcgcgctcccgaagaaaccgtttacattacgggacatttgcttaacttgccgcgcggcttgcacggttttcacgtgcacgaatttggcgacacaagcaatgggtgcacgtcggcaggcgagcactttaaccctacgcaccggcaacatggcgcgcctgacgctgcggagcgtcacgtcggcgatttgggcaacgtgcgctccgtcggctgcaccgcgctcacgccggtaaacatgagtgataacgtaatcagtttgtacggcccgctgagcattctgggccgtagtttggtcgtacacacggaccgtgacgacctgggccttaccgaccacccgcttagcaaaacgacaggcaactcgggcggccggttgggctgtgggatcataggagtaaaatgaaacagtacattaattattaaattttatttagttcagaatacatactttcaaagttggcttttatatatacgccttgttatcgcaattataatttataaaaggtgcgtcacgccgatcttggttttcgagtacgatcgttcgtgtaaagcgagtgtgctatttttagacatgcgtcacggttgacctcgctttacgagtacaatcaatcttgaaaagcgtgtccggttatgattcatctatgaccttgcttttcgagtacgatcgttcgtgtaaagcgagtgtgctatttttagacatgcgtcattgccggccagttcacatttgaccgtcgacttgaacgcacgtcgccatggccctctccaaggttaattttgtcaacggctcgctggaggtgttcaccgtggcggacgacaagcgcgagaactggatggtagccaattacgctgcttgaaaacttgacacgcgatcagcttatcgaggcggtgcaatcgtccatgacggaacgccagattgctagaagattcaatgggcaaataaataataactaaacattaaaattggtattttatttattaaattattacacttgataaatgcgagttgggtttaaaatttttgcacggcacatggggcaatctttcagtacagttgcgcatttgacgcacaccaacacgtgaccgcacggattaaaacaaaccgttttttctgcattaaagcaaatcttgcacattttgttttctggcaacgtcaacggctgctcaacacaatcgctgttttcttctggcacgttaagctttgcggactgctcaacgttttcttcttttttaatgacgcacgctttgctaagcacgcgttgcacgtagtcgtagccctttacgagccgcacgtatgtgcagcgatcaaaccaacgtgcgtgttcttcccacggctcgtcggtgctttcccagtctttgaggccgccgtcgcaatgaaaacatttgaccctgtcacccttgccggtgtaataaaaaccggcttcagctaattgctctggcttttgttttaaactaaccggccaatccacaaaagtttttaaacgtgcagactcggtgctgtatttagggtgcatggggccgaacattacacgcgacgatccgcattcatcttgattagcaacaacttgcactggtgcaggggtttgattctgttgtgcagtattctgttgcacaaacgggcactgcggtgcccatcgtttatgatctacggccgggtcatcgccctccaaccagcgcattatttccactttgcaaaacgcgcagcgcacctcgtccgagcgcctcaaatagtaaaacccgttggcggccatttgacttggttccaaaaatgacacgggccagtcaacgtatgtagcgagacgcgcgttctcgtctttcatatcagacattgtgtgtcacacgtttaaaattgtgatggaacaacctcgctttataaacaaattcttaatcgattaaaacagattacaatgtttatcgcaccaccaccccgtgaggcggacgttcaactgctgataatatcaatgctggcaagcctccccatgctgacaatactactgtgctcgccgcaaatgacggtgcaaaattgcactgtaacgaacggcgcgctgacagacggcttgttgcagtccaccgcgtccgcgcacacaacactgcacgccgtttgcgtcgcgtttcaccaccgtcgcctttttatgggtttgctgttggacgcggcgtcaggccgccgtttcaaattgatagcactcgtgggcgtcgtgtattgcaacaacgtggtgttaattgcggccgtgatcaagtttttttcccgtgccactcttggtagtggcaaattaattggtggccgtttgcatcaagacgccgtacttgaagattgtgcgctactgtgcgcgttttacgccgtgacggtgttcagcgtgttgcatgttgcgcgttggcttttatttggatggactacgctagttaagtgtcgagatttaatcccgtttgccgccaccgccgtcgtggtcacgacattgtacgtggttgcactcatattggccgcgaccgtcatacccgaaaacggtttaatcatgtttcgcaacgcgtcgtttgctttgtgcaatacaacagacaatgtgtatgataaagtgaaacttcatttataaaaaaattttagttttaaacggacgtttattttaaataccaccggcccaagtttgcaatttacaatttaccatgatttacaagaataaaacattaataatttgtgttttattttatatttcacacattttattgtaataataataaattaatttatttagattacatttaccaaagcgtttacaacgctgtaacagctgcctaaaaaattcttcgtccaacaatggcacaaagcattgcacgaagagcaaatcccaattttttttcaatatttcctcattgagcttgttgacgtgctccatgcgcagtatgccaacaaatttgagacaattgtgtccgacgttgacacaccccacgccgttgacaaacggcaaattaggagaagctacgtaattcacgtaggtgcgcacagcatcatagtttatataaccgggccacagagtggttgcaacacagtgcgggatccatacgctgtcgctgtacatttctgcccatcttaaacacattgtggtaaaaagtttttgttcaacaaggatcgcgcgaaggcaaacaagtttacggtgccaacaactgtgtgcaaacgccaacgcttgcaacgaagccacttttttgtgaggcattaacttgttgcgttgtgtttgattgccgccgtacagagtaacaggtctgctcgacatggcgccgtcacgctcgttgcaacgcgcgattaaacaaaatcaacacatgcgcgttgccgaactggctctcgaaacgaaaactaatcgtttgtttttgctgctcgattgtcacaacaaagaattttggatgggcgtgtcgcgcaactgctacaatcgcgatcggtttctggcggcgtttgcagacaaggtggattgggacgcggtgtcggcgagtccgctgaccattgctacggccaggacgtttgccgataaactaaactgggcaattgtgtcgcgacaaagccatttgacgcagcagttcatttacgagatgggtgagcgcatggacatgcagatcgtaagcgccaactacaacaacttgtcgctcgccgtgcagcaaaagtacgcagctattcttgattgggattacattgtgcctagccattgcatgttgcgcgaatggttcgacagccccattgcagaccacatttgttttgatttagtggccaaatacaaacatttggacagattgcacattaacacgccgcattgcatcaccaaaattaacttgaatgtgtacatgcaaaatttaaacaaggttagcgacgcgttaataatttattgtttgcgcgaaggacgcgttcaagaattaaaagcaatttccggaaccatcccgtgggccgatcacatgtacgtgtttgacgagtatccgggtttggtaaagacactgcacgccgactgggccaccgtaacctcgtggaacgttaacaacgccccgccggcattttacattcgccaacatttaaccggtgacacgtttaaacgcgagtttgtcgccactgcgtactggaacaagtttattaattacgctaccggcacgcaaaacgcagccagcgccgcgtttgcattgatggtgtttgacaactttaaatttcaactagattgggaacgtttgttaccaagcgatcgttttgtcaacttggccgctttgcatcgaatgaatgggccgcttgtcgcgtttgacgcggccgatgacttaaaagtgtggcgcgcgtacggcaagtttgttagcggtagcgacgttcaagaatgcgaacacatcatacctatgaacatgaacatgagagacgcgtaccacaaaatgacgctcgtacaagcgtgcgcgtcgcagcgcgaacacgacgacgcacgcacgtgcgaacgtttgatggcgctgaacggcggcgaagaagccgtgctgaattggaacatgttgtcagcaacgcaacaagtgtgcccttttaatttgcgccatttgcaaaatgttaacgcgcagacatacagacgcgacaacccgcactttgtgcaacaagtttacgagatgatgatcgccgctcagatgaatcttaatggctttttatgagataaaagagatgagtttacctcatttggccaaatttgacaaagatgttttctcaaaagaacaacgacaacggtcaatctttgaccaaacaattggataaaattaacgaacacaaacgcaaaattgccgtggaaagtcaacattttgaaaaaatttacaagctaacaaagaacacttcagaattgaagaatttggaacatcgggtgatggaatctaggcaaaactttctcaattttggagtaaaacatttttaataaaacaattgtacaattaatgtgtttattatttattttctacactcaaattttccaaacggtcgcacatagagtcgcgaccgggacttagctctccctcctccaggtcgtagccgtgttccttggcgtacaattccagttcagtgtcttcgttgctccacctgaacggtggcggcggcgttttgggcagtggcgaaggtgatcggcgtgaaaaacgacgcttgttgttttgatgacacgtaaaacgcacgccgtccggccaaaagtagcggccgctgcagcgctgtaacagctggcccacgcgcttgtctcgtacgcgcaattgacgtcgcgacgtgcgccgccagtcaatgctagaaaatgcgttgcagggtgggttagcttccgcgcacatgaccgttatcaactcccgcgaaaagcgtttgctgtatgcgtgtccgttgtactggagttccattattacgtcacgaatatttttacaaaatcggttacgtcttgcctgcacgctgggcacttgccgtctaacgcaaaataacactgcatacacacacaaaagtggcggcaaggcaacaagactgtatcgcgttggcgttcaagacaaattttgcattccaaagtttcgttagtggtgttggtagtggttgtcacgctttccgcaagcggtgcgtcatcgtgtgggtgagcagtttcacaaaattgttcacctttaatgcataccacgaaatagcattgcgggttggcgatcgcgtggcggcgccacgggtcatcgcccggcaaccaattgcgcacgcggtaatcgcaaaaaaagcaggccgtttcgtctcctaatttagtgtgaaacatgcccgcttccgcgatggatggcattaaatgttgcaacgccacaggccaatattcttcgaacgtggcgcgacgcgcgctgggatgcgccagacggctgtacacgcagcgcggcctgccgggtgacaccaaaattgcgtcagtgctcaaatcgccactaaattgctcgctttgcgcaatcttgttagcgtacacgcaataaggcgacagcgtcgcgtgtacaaactcgacgcagtcgtcctcgcgccagtttttgataacgacattgcaatactcgcacgccaccgcgtcgtctacgtgctcgtacctaaacccgttgacaatcaaactgtttactaacgcggtgttgtcgataggaaagttttcaaaagaattgtggcgttcgattagcatgctaaacacgtgctcaacgctcgtttcttgcgcattatcgcccactgtcaaaatgtacaaaggtgaaccgttcatagctgtgccgatattatcaacgcgttgcggtcgttttggtgcaatgacacgttcaagtggcccaacttgacgcgcgtttcggcgttgatgacgtgaacggtggataaatcgtgatccaacactatcagttcaaaatccaacacgttggtaatgtaacgccttttggaatcaatcttaaaattaaacttttttagttcgtctaccgaggcgtcgtctacgatcttgtcaactataccgttacttaaatgttttaggatcgcgtaatggtgcagtttgaaaggcgcgcatttgctggagctaaatgttaaatttttaagcaaatcgtcagttgtgtaaacgaacgcgccctcggcgcacacgtctatcgaaacgtcctccatatcttatatataccaattttaaaaacttattgtatcagtatcgacacgtacgtcatggctactaaacgcgcgcacgctagcaatgaccacgaagaggacgttaaacgagcccttgtggctccgcaagaaacgcagttgttaccctacaacaatagcgggtttactatgaaagttgaaaaagagggaaaacttcgcgtgttcacgcctgtcaacaatatgcaaatgcaattgcagcagcaacacatgagttggcagagtttaatattgtttaacttgcaagagtttaattttactgtcatcaattcaaatcatggagatttgcagtttttggagcacaaatttaaagagttgaaaacattgtccagctattacgaatggcgcaaggaggacaagcctgaaaataatatttctattatggaacctcccattggcaagtgcacctacacgattggacgtcgcgtcaagggacgtcccaacggatttgccattgctgaatttggtagcgtgaagcgcgccaaaagcaattttggccaatttttaagcataacctggcctgccattcacgatttaaacgaagtgtttggcaacattatggatcagtattacaagtatgagtatccgttaaaacttgaaaccagcgtgtgcatacatttaccggagaaagatttggaacgtgaagccaaagcacgccagtttttgtgggtgcgccgcgacaacaacccggagctgtacacaaccggccaattgaatcagccgttggaggtggtgccaatgactttaaacgagtttgattacttgtttgaaatgggcaaaacggacggaccgtcacatgaagtgcccgtactcgtttgcggttgcgttgacggcgtcaaatatggcaaagagattcaactgacggacgtaaacaatcgcaaatttagtgagaagccgtattcgctggcgttcaaacctattttgtttttaattctcgagccataataagcgtgccaaaatggattgcgacctttccgccgcgctaaaaaagggtcgcgcgcttctcaacgccgcgcttaatcaacaggaaaaaaaggttaacaaatactttgtaaagccatcggaaaataatgtggaaaaaatgttaattttggctgccgacattcacggccagattgaacagatggaagcgctgttgtctgttgcgcacaaggccgacgaagaaaagcttgaatttgccaaagattgttcagatttggacattgacccggcagagttgagtcgcgtgtgcaaacaatttgatttgtcttattttgctaacaagtatgaggcggccaaggtgttagcattgtatcttgcagcctacgacagttttttaaagcacagcgaacaactaattaacgctgtgctccgtttaaatgcagaaaacgctaccgttaattatatggttaaaaataaatgtgtaatcattaagcatttgtgtgctatggagtatttgattgatcctttggtaaacaataaaaatacagattaataataatattttgttttattccaattgtacaatcctttgaccgtaatgcgtgcctgtgcgcacgcgtttaccacgtatgtaatcaatatttatctcgctgtcgcactcgacaacgcggttctgctgcgcggctcgttttatagagttgaggcggcgcgtcgacagctcaagcggattatacagcgccgatttttctagtgtaaacgagttgagatgacccttgttgaaccactctagcgaaattataatgtacaacaaaaacaaagtagttttgtcggtgctttcaaaagcatacttgttttttaaacaataataataaaattttaaagaattgtatagatagaacatgaaattgttaactcgcatgtagtactcgacatcggtaacaaacagcaaatttacaacacgttcttgcaacaagtgtgctaatttgcgcaaatatagcatagagtttttgtcgtcgtcgacgcgcaccagcaacacgttgggagtgtgcgcgtttaataccaactgaaagttttctgtttgcaaagcgtgcacgaccgaacgccaatgcgccgcagccacttcaagacaaatgtattttttagaaaacacgtgtcgtttaataatttcgctgattgacgaaatcgaagccaaatacttttcgaatgccgggtcgtcccaaccgcgcacgctggtcggcgccgctacgtcgggctgatgcttaaaatccaacccactctgtattaacttggtggtgattaaaatgcttagctgctgaccaagcgtgtaatggttttcgtaaccgcgctcccacattacattgcacgcaaacttgatcaggttagttacgcatggctgttgtaatatacggcgcaaccggcccgcgtcgcccttgtaccagcggtcgcggcacaccagcttgaacatggccgcgtcgtgcgcgctcaactcgggccttgtcacgtctacataatcgtctatgtcgtcgggcgtcgcgcacgtgacatttgttaattgttctggttgaaaaacttttacatcaaacacaaagcgcacgaatccgtccgagttgatttgcacgttgcgcgtcaccaaccgtggcagctgcacgtcgacgccgctaatgtgcaaattgtacaacaacaacgcgttgtcttgtgcgcggcacgcttccggtaaaaattgcgtcgtgtagtgtaaagattgtgcaaacatgatgatgcaatcggttgctaaggtggactatgagcgtttgacctacgtggccgacatcgcgacaatgatgcaacgcacgctggattttatggcggccaacggtcagtgcacgcgcgcggacgcgaccacgctgtgcatagcggacgacaccgccgcgtggttgtgcggtcgcaccgacgtgtgcacgttcgcgtcgtttcgcgtgcgtatagccgcgttcaagcatccgtgtcccattctaaaacattttttgtttgaagaaagtttggcgcagcgatgcggcggcccaatgccgcgttacacgtacatgaactattcgttgtttaaaaatttgctcgccattaaactgaccgtgtacacagacgacccgcacgccgatgggttaccgtattttgtaaagtttgaaaatggtcgtgcaaaacagcacgttcgccaaactgcagccgtacactataaattaccggcgtttgaacagtgcgtagaagaaaattattgcgcagtcggttattgaatagcaaatataatggacaacattaaactgcagctgcaagaattttttgccgtcgatgacaacgtgcaatcgcccgagttggattcactcaacttgttggcgcaccagaaacggcgcccatcgaatggatgttgcaacgcgaaaaaaacgcggtcggcgcacggcggcgtttggcagacgacatggccttggcaagacgcttgtcgggtgctcatgttgattgccaacgataaagatgtggcttgcaaaacgttgattgtgtgtccattgtcgctgcttaaccattggtccgcggagaacggcaagcacgatttgcatattaacgtgcgccagtttcacaacggcgatcccaacgaaacatttgatgagcatcaagttgtaataaccacgtacaacacgttgcattctcattacaaatcgttaaaaacgcagcatcgcgccagcaatttgttaacccaacattggcatcgggttgtgctggatgaggctcacgtcatcaaaaaccggcatacggccgtgcacgcggctgcttgcgctttaaccgccaacaaccgttggtgcatcaccggcacacctattcacaatcggcactgggacatgttttcgatcatacactttttgcgctgccgtccttttgacaacgtaaatgtgtggcgaatgcttaaccgcaacaacgacaccaaccgcatcaaaagcgtggtaaagaaaattgtgctaaagcgcagcaaggcagagattgcgctcgacataccggaacacagcgtcgaatacgtgcccgtgcggtttgatgaagaggaaaaaattgtttacgacaagctaaagagcgagtcccaacgcgcgtacgacgacgcggtagccggcggcggtgacaaaactcgcaacatgcaggacgtgctttggttgctgtgtcgtttgcgccaaatgtgctgccacccggcgctgaccaagtgcgcgcacatgtttgcagaccaagcaaccatatttgagccgcaatacgcgagcagcaaatgccgacgcgttctagagattgtgcagcaagtacttgacacgcccaacgacaaggtggtgctggtgtcgcagtgggtagaatttttgtatattgtggcaaaattattgcgacagcgcggcattcccattttactatacacgggtcaattgcgcgtcgaagagcgcaccgcggtcgagaaccagtttaacgccgccgactcaccgtaccgcgtgctgctcatgtccatcaattgcggcggcgtaggtctgaacctaaccggcggcaaccacattgtcatgttggaaccgcattggaacccccagattgagttgcaagcgcagagccgcattcatcgcatgggtcaaaaaaagcaaacgtacgtgtacaaaatgcttaacgacgaggacaacagcattgagcgctacatgaaaatgcgtcaagacaaaaaacttacgtttgttaacaaggtgtttgaccgttcggcactcaattacgaggatattaaaaagttttttagtttgtaataaaaatatataaaccataacgtttgtttgtctcaatcaaggaacaattaagttattgacattttacgtcaacaagtttaacattagtacatatgaagaaacaaaacgcgcaatacgccaattgttatctgtgtgaagaaatagtatatttgtttaagaaacagtttgctaacacgttggctactgcggcggcgttgtaccgaaaacgcatggccattgtgcgcggcggcgttgtgctgtgccaacgttgcaactcggagcttaatggcggcggcaacgacgctaaccggcgataatggtcgctattttgaagcgaatattgagcgcgattgcgttgcgtttacggtgcgacgctacaacccgcacgttgtcgggtttgccggcattcgcgcgcacgtatttgaacaattacgagacaaaagcttgctgctgcctttttacaccgattgcacgcttagcaccgtgccgtccaaatgttataaatgcaaaagaagcttgacgctgtttccggccgtgtcgtatctgccttgcggccattcgtgtttgtgcaccgattgtgatgaggtttacaataaacaaaatgtgtgttttgattgtaatgatagtgtgaaatttaaattaaaattcaaaaaataaaaattataaatttattttcttttgtttattttgataagcgtcattcaatatgccaatcacgttaatactcgtgctggttgttgtgctatttatatttttgtttgctagcaccagtagcaacacagttaataccaaatcctacactaacaataatgaaatcatttcatatcccacgggtgttcccgtttcgtacggtgatgaattaatttcatttgaacaatggtccaaagacaacatgacgagcatatttgcaaaaaaagcagaaaaggtggccaacccgacgcgcaattggaacgcaaacacggtgtttgacaacttgagcccgtggacatcgcccgccgattttggcacggtgtgccacactttaatcggctacgctgtgcgttacaacaattcggccgacgcgttgtatcaaagcaccgaattggcggacaatttgattggcggtttgcgcgccgtgtgcgagcgattacccgacccgccaccgcaccagcaagcgccgtggggtcccgtgtccgattggtatcattttacaatcacgatgcccgaggtgtttatgacgttaaccatagtgttaaacaatacgtggcattacgaagaagcggcatcgttgacgcagtattggctcggtttgtacttgcccacggccgtcacctcgatgggatggtaccgcacggcgggcaacgcgatgcgcatgggcgtaccgtacgtttacagtcagctgttgcgcggttattctttaaaacaaattgcgcacgagccgagtgttcaagaaacgctgcgcactgtcgcgttcccgtttgtggcgacgggcaacggcctgcatgccgattcaatttacatcgaccacgtagatgtgcgcgcgtacggctacttgattaactccttctttacttttgaatattacacgcggctgtttggcgcaaacgcggtcaacaccgaaggtttgacacgcgccattgaaaacgtgggcagccctgaaggtgtggtcgtgccgggcgtcatgtctcgcaacggcacgctatattccaatgtgattggtaactttattgattaccccattgccgtgcattcggcagacttatccaaggtgcttaccaagttgtctgacacgtattacggtgcggtggtgggcgtcaccacgcgattagcttattacgaagccgacccgaccaacaacacgcaggcgccgctgtggacaatgacgcgacgcatttggaatcggcgcgcgcccatcattaactacaacgccaacacgctgccgtttgagtcgggcgttattttacaatcgctcaacggcattttgcgcgtgcccagcaccaccacgtctacgcaatcgttccggccggccgtgggcaacacggcgcttgtcaagacacgcaccgccggcgccattttgataaacgctcgttttagcgagatgaacaatttgcaatttaaatcgtgcactctattttacgaccacggcatgtttcaattgtattataacattggcgtcgaacccgattcgctaaacaacgtaaacgggcgcgttgtcgtgcttaatcgcgacacgtcggtaaatacaaacgatttatcgtttgagttgcaacgagttaacaacggcggatcttctgaaggcactgtttttaacggcgtagtatgtcaccgcgtgcctattacaaactttaccgtgccctcgttgaccgtaagaagccccaatgggaacgtggaacttgttgaacaaataattagttttcaaaacatgtacacggcttctgccgttgcctgttacaaattaaacgtcgaaggttattcggacgctctgcgagcgttccgcgttaacacggacgaaatttatgtgaacacgggcgcgggcgttaaaagcgttgttgcatacccgtggttaatgattaaagaagacaccactgttgtttttatgtcggccctcgaagacacggtaataccgttcaatgtaataacaaacgcttttagcgctattaacgagcccagtatactgtatactcccaataattgttattacttgcacggcaatgggtttaaattgaacgatgactcggttaatttgcaatttatttttgatataatgcaatagactgaaaatatgtaaacgttagatctgacaaaagactgattaaaacaacattatattaatttataaataatttattatattaaaagcgtaaattcacacttgctgccttgacatgtgcggtttgttgtcgttgtcacgtacacgtcgagtttgataaaatccaagccgtttttgagcacggcagtaaaaaagtcaacggtgccgtcaaccgtcacaacgatttttccgttcacggtgggttcgcgcacgtgcacgacggcatcgttgaccaccattttgccaaagcactcgtactgttgtcgcaagccgctaatctcaatgttggcaattatggctccggttttgagtcggtcaaacgtaaacgacactcgattaggactttcaaatacaacgcgacggcacgcgtggtgtttatcaatttttacgcgcacgttttgcaatgcgtccatgttgttgcaagattgtcactaaactaatttgtttttaataatttaaacagtaacatgtttatttacatgataataattaaataagcgtcaacaagtttatcacatttttttttgtaattaatatgattccaatacgtaatcgtcatttgactttgtcgtgtccattatgtaacgcaactgctacaagaatgcgttgcttttgccaaaaatacctgcaaacttttaaaattacgccgccaaaaacaactagtttttcaagaacaaacaaacttgaaaatcaaattcagcaatgacggagatgagtcataattgagtttgttttacaaaaacgattgaactcgtaagcaaatccggttatgactcataataatgaatgttttacaagaacgaatatacttgaaaattaagttggaaatttaatgtgttttcatgaagacgttattgcacatcaacaggctagacatgacgtcaaactcgccgcaattttgaggcaagttggatccgcctcgcatccattgcaagctttccgttaaccggttgcccacaaacgattggtttttggtccactggtcaaaacgcgtgccttccattttttcgtgacctgtgtagttgtttttgttaaattctttgtaaatgttgtcgggcgcattgttaaacagcatgtacggaatgttgaatatggggtagcgccgcgcgtttggatcagcgtgattgccgccgcgcaccacgtatttgcgctcgatccggtcaaagttggactggcgtgacaaaaaagaaacaggtgacaaacaaatttgtgcatgtgtgccgtcttcggccatccattcggtcaggtcttcgctgcggttaagcactcccttttgtccgtacacgctgcacacttttacgccctctaaatcgtcggtggacgtgagcactatagtttttaaaactaacgcgtcgccggtcagcacgatgctagcgctcagcgactctattttttggttacgagtttgccgaaaaaacacaaacacaaagtacaggttaaaagcgccgtttgtgcgcgtttcaatcatgcaccgtttgttgtcggcccacgaaaccttgacgctgctcagcaacacgcccgcaaaatacacaatcatattatcgggcaacaaaacgtgattgtgttctttgttctcgataaagtttaatattggcggcgttttgccaacgagcgttaattttgcctttagcttgtttattttgttgttatacatgcgtatgggcaacgccatgtgtggaatgtacggatcttcggcggtcatgagttttgaatcgcgcaccaaagtccacagtttaaccattttgttgttcattaacacagtgtcactgaccgccacggacaagcccacgggcaacgcggttcccagcttgctgtaacgcaacactggcattgcattttttaaattggtcagcgctactatcattttaggcaccggtattgtgtaaaataggtgcgtgtaatcggtaaagtaatactgttccagttttgacatgagacacagcacgtcatcattttcttcaatttgacacccgttcacagccgggtcgtggaacagcgagtttttgtaatgatactcgtagggcgtaagcagcgcgttgacagtggcgttgaccgcaccaaatatgcgcaaccgtttcgccacacataccataccttcgtgatggttaacgtacaaaatgctttgcgacacttttagctcgatggggcagcggtgacgtttaaaagcgtaaactatttcgggcacgttggcccgccggcattttagattggtgggtctgtcgttgaacgcaataagcaacgtggaggtgtcgcaatgagcaatgtcatgcaccggactgaccaggttcgattgcagcaattgcgcaaatttgttggccaccatgtcgtaatcgacgctgggcaggcgcgcgttgcggcacaaaaaaaattttttgcccgctacggtcatttcgccgtgaaagaaactgccaataaacttgacaaaatcttttttttgcttaagcattttttggcgcacgctgtcgttggtgatgcgcgtcacttcgctgcccacacggtatttgagcacgggcaacgcgatctcaatgttgttgttgctgcaattgtcgtgttggctaaaaaacgagcgtcgctgtttgctaaacgtttttgatacacaataaattaaccggccgttgaccacgctgtccactattttcttagactctttgttgtacaggacagcttgcgttttgcgccgttttgccggcggagcttcacaatcttccgcacggttctgataattttgcaacaccattgacgtcagcagcaattccattaaatacgcatgcttgtagattattttgtttgccaagttgtctatagaatagcaaatgtcgtggttcattatcattttaatgtgtttaaccaattgttgtttgtgcgttttgctgtatataaacaaaaaatcaagcgggcgccatttgccgctggtggccaaatacgtttccagtaccgcgttcaagtcgttggttaccacgtaatcgctggcgtacacgtcgcgcgcaaaaagtgcgtcgttttgtttgtcgtataccaattggatggcgcggttaatatgtttttcaacgtccacgttaccgtacaagaacatgcgtttgcaatgcttggcgtatagtttgtcataaaagttgtgtattaacacgttgttattcatcatgatattgggaaaacttaaaaaacgaccgtctagcataaatgtgcccgccacgttgttttgcgcgtcaaactcaacatcgattgtgcgcaaccgtttgtcaagcgtagtgccaaacaccaccaccacgcatttgtgaagcacgcaattgcgtcgattattaagagcgcagcacatgtacgatcggcgttcctgtattgctgccaggctaagcggcgccgcactttccggtgaacagcattcttgtacaaacgtcaacccgtacgccgactctaatttagcgtataacgcgttaaaatcttgcacgacgtccgtcatattccccggcacgtggcacactgctgacaatggcggccaacacgcgtgcaaccaaacgccgcgccacggaagaaagcgagtttagcgcacgtcttaaacaaaataaaacgtgcaacttgtccgacgacgagtttcttggatattgccgcctcgaagaaatagattattacgaagcgctcaaattaaattttgagcccgctgcaccttttgatgaaaattttgtgttattcgttattcgaatggccaacgtggtcacaaaacaaattagaaagtaccgcaatttgaccgacaagcaccataacaatttggtacataatgtgctcatcatgatcgagcacgcgcgcaacgtgcttacgcatcaaaacaaaaaagctagttacgacaaaattgttgcagctaaaaatacaaacgtattaaaaatttgcgacacgtacatgagaaggctcgaacaaacagacaaagaactaactgaagcaaaaaataattttgtaaatcaattaaaaacgtataatttaccattagctaaagcggggttgtctagcgctgtaagcgaacaattgcaaaaatggttgcaattacaacctgtagtggcaaagcggccgaccaccatgaatcgcattcttgtaaaatgggttttgtttcccaatcaattagattataacaaatatcaaattgagcaagaattgcgtaattattttaaaaaatttggaactattgttaacgtgtacgtatgcgacattgaaactagcagcgctataatcgagtttaccacaatggaagcgcagcgtaaagctattaaagaaagtcaatcacccgatgtccactatatcgtgaccgaatacatgctgaccgaattttacaattcgcaattgcgctccaagttgcgcgacaaaataaacagcattgaatcacagttaaatgacttacagcttaatttacaatctatacaaaccagataggcgactaaaaactttgtataatctgatatctttgtaaaaatttaatttaattaaaggtttttgttaaaattaattgcttgtttaatacgacgctttaacaatttatttgaaataggatatatatatgcgtaaacaatttgggtcgtggcaacgacgcaatatacccatttgttacacacttttattgaaagactgtcaagagtggcacttaaacgcaatactttcgcaatttgttaccactgacaagtgacactcaaatagttatttgtcgcctgcgtggaatataagggtctcattatttatgttaagagcacgcgtgccattatgcttctcaccgtacatctcaaggacaggcattattatatgtacaaattgttcaaggaaatttggccgacgtgcacgacggaatgtagaatatgtttagagactttgggcgcagacggcggtgtggtaggcgtgcctgacaacggaatgctaaacttggacaaaatgtttcacgccgaatgcattgaacgctggaaacgcgaacgcaatcgcgatccttttaatcgcgccattaaatattattttgcgttccctccgccaacgttgcacgaatgcaaaacgctgctggagcacacgcgcgggttcattggcgacgacgaaattgattgcgtgtacaaaacggtgcatcaacgcgttaccaccgaagatgcgctcgacgtggaactcaactttgcgcgttattttaaacatggcgcacgcgctgtccgcagcggacgttgacctaattgcgtgtgtactaagggacaatttgtttttgttaaacaataattatattatttgcaatgtgttcgaccaaggctccgatcgcgttgaacccgtgtgcctcggtgaaattggtgccgtacaagcccatacgcccgaccaagatgcaatgctggatgcatcctcgacgagcgacgtgccgagctcgacgacttcgtaacgcctatcacaatgagcgtaacgaaagcggtatgctacacgcaaccgtgtatagcaacatttttctcgacgaacgcggcaaaccctattataggaaaatgttgcgaaaacgttctgacgctgtcacggcgcgccacgcgtttgttagcgctggtgaggtgcacgattgcatgttaattgaaccggcgcctagcgaacgttttaaatctatcgaagaggcgggcgaaaccaacatgactacgctcaaaattattataaacacgctagttgacgcgttgggacacgtggcggctaatgaatacctccttgtggcggaccgtttgtttatcgacatggtgtattccgaatttcgcgctatagtgttgccgcagcacgcgtacattttaaaacaagcgtgcccggcggaaacagacagcgaaagcgacgacgacaacgaacgctgcgttcgacgcgtggaaccgccgtggaaccagatcgtggagttggccagcgtcgcgtccgccgacagggacggcgacgcgcgctacaacgagtggcaacggcaatcgcaatatatttatcgcagctttttggtgtacgtgaccatgctcacggtcattttaaaacaaagcaatccatttattattagcgaaaatagttccgtgtcggtgatattgcgcagtctgggcaaatgccccgacaacccggagcgcgtcaagtgttgcaagttgagcttcggcggtgccccgccgggacacgtyatgtgtccgccgcgcgcaatcatcaagaaaatttatagctacgccaactgggcgctgaacccgcaaaaagaccggcggtatagcgcgctaatcgctcgcccgcccgaatcggcaacaggtggcaaatccaaagatttacgagaaaacattaacaacgatttgcatgccgatgacattacaccgctcaacttgttggactgggacaactttgttggtgggtacatggactactttggcgcgacgccaagcgcgcaatcgacgggtatttaacggctgacctatttgttgaacaaacattgtgttatctcggctgattagcgagtggtcgcaaacatgaaaaaagtgtcactaggaaaaattatagaaagcaccgtagaggacaaatacaaataccatttcaacaccgaccgaccgccaagcaagttgactttgggagaattttacaaaacttttgaagccaatcgcgtcgggcagcacactacgtacaacgtcgtgggcaaaagggattatagctgcatcgataagttgactaaaaagtgttaacatgtttcaagctttaatacgacgttttaaaaaagaaaaaggtgaacaaaaccgcgagcaagacgtagttttgtgtcccaggtgttatttcgtggcgcccggctacatttccgtcgcagaatacacaagaatgcacataaaatttaatgaacaatttgtagataaatgtttgaacaatctggcactagagcaacccaaaacttgggcaaattgttccgtttgtcccgccctttactaccccttgtattaataaagttaatttccaaatactcgtggttttctttacaatatttacccgttatacaaacgtgtgtttaacacccacaatataaagtcgcatttccaatgcgaaaattatttgtgaatttatataaatacaattctcacgcagacgcgctgtttattatgttccgaattcactcagtcgagtagacgtacacgatgttacacccgattgtcgcgagacgtctagactttgataacgtaatattggatctcaatcatgtcgcgtttaacattgatcacaacaaaaacaatgaagattatattgtgtttttaaacgtgaaacgcgcgttttacaaaaactttaatctcacttgcgacatgtctttggaaacgctcgcgctgtacgtgtacgaaaacgcatccgtaattgtcaacggaactcaactgcctcgatctccagattttgtgcaacacattgcgtttaacgcatcggaccgcgatcaatctatgttggttgattttacaccggaagcaagaatcgtggtagcgcgtaagctgcgcgccaacgaacgctactaccagcgcgccagcgggtttgccgactttcagcgacggcacgagcagccgcccgcgcccgtcgaacgcgatttgcacgtgcgaaacgccgcggatcgcgagttggaaataaaactgtttaatatgtgaaaagtgtaaatttattaataatcatcttcgtcgctatgtgattcgacgctgctatagtgcggttgagatttattgttataatgtttgttaataggaattttgcccttaacgcgcttttttcttgacgcctttgcgcgcacggttttgcctgtgctaacaagtttgtcgtcggtttcgtaagcgctgctggcttcgctatcgctgctggtgctggacgcgtgggtgttttttcttttgtgtttctgcaacgacgacgcatcaagttgctgacgctgcacaccgtcactgtcatctgacatgtcgtcacgtataatttcgtatgcggctcggctcggaatccactgcaagtcgttgacgcgcacgtaacgttcctcaagagcgttgcgcgctttctgcatggctaagtcttcgtcgcccgcgtttagtttgtggtgctttgaaaacgtgttaacaaacagctgtttagcgcgtcgcggcattttttcttcgtaaagggcgtcgggaatgtgatacattgtcgctgtccgattcaatgtcgctgctgctgctgctactacaggaagaagaactgctagttgtgtctgaatcgttagcgtcgggtcgagcttgccatcggccgtcaattaacatgtactttttcctaacagcgcagacggctaattttgtagcaatttccgcagaattaaacttttgtaaactgcgggcgtagaatttgttaaatatcctcttaccgttatacggcaaattgtgtaaactggttggtagcatgttaataaaaaactattatttttaaaaatggacttttatttattccaaggacggatgggtggcaagaataacacacaaccatgagattcaacttgatcacttaatttagcttaaatttaaataatattttgcaacatgctagattcaaacacgtcggccgccttgtcggcgtcaaacgaaaaaaggttgttggcttttagataatcaatgtgttgttcgtttttgacaataaacacgcggcttttctcgtcgcggcgtaccatgacgccgtgcttacacagcgatatatacttgtagaccggcaagagtgcgtcacgagccttttttagcaacaatttatgctcggccggcgcggccacaaatatctttacgggcccgtcgtaatcaatgtctaggctgtaatttttaaggcgttgttcgcgcgacttgctctgccactcgcgggcgcgcgacgcgtcgcacaacttaaccaccatgtggttcttgtgaaacgacgaatcgagcacgtgtttaaactctaaatcaagcaatgcgcaaatttttttcaaataaaatgttctaattcttttgctagtcagtcgttgatcgtgaataccataaatttccacgctatcgtttaaccggtctcgctccaattgtttaagcttcacgttcattagtttaatgtcattggactcgtcaatttgcgagttaattaaagacttgagtagcgacacgttgatgagctgttcgaaccggtccatggcgacgacacaataattacaaaccctcttatagtagcgggcggcgcagcacgcgcacgcgtttgtcatggtttcgtttctggacaagtcgcgaccagagtttgatttaattttggaccctactaaacttgaaaatgtggcctttttttctaatcaagaatttaaaattgttttaaaaaatctcattgctgacctcaaaagaaaccaaaaacccaactatttcaacggtctcatggaccagatgatcaacgtgtacaccaacgtgggcggcggcgccaacgcggatgctcttgtaaaaattattgacgccacctgcgtcattatcactgacttaccgtccaacgtgtttttaaaaaagttaaaaaccaacaagtttaccgactttatcgattacctcattctgccaaactttattttgtgggactacaactttataatttttttaaacaacacgtttaattccaagaacgaaaacagttttgtggacatttcgggcgcgttgcaaaaaatcaagctgacgcacggcgttatcaaggaccaactgcagagtaaaaacggctacgcggtgcagtactcttactcgacgtttctcaacaccgcctccttttacgccaacgtgcaatgtttaaacggcgccaacgaggttatgccgccgctgcacagcgtgcgccgctattttggacgcgacgtgcaacacgcacgagcgtggaccacgcgtcaccccaacattagccagcttagcacgcaagtgtcggacgtgcgcatcaacaagtgcgacaccgattggaatgtaaaagtgggtcttggcatatttccgggcgccaacaccgattgcgatggcgacaaaaaaattattacgtttttgccacaacccaactcgctcatcgacgccgagtgcctgttgtatggcgatccgcggtacagctttatttgctttgacaaaaaccgtctcacgtttgtgtctcagcaaattttctacttgtaccaaaacgtaaacgcggtagaaaaacttttaaaaaccatgccgctggcgcacatgctgtggcacatgcacgccgacgtcaaattttctactcgccttgaactgctgttgcgagatttttgcctcgtggccagctccaacgccagttatttgctgttcaaacagctcacaaagctgattcaaaatgaggaaatggtgtgcggcgacgaggagctgtttgggttggcgggacagtttaccgccatggtggacagcggcgctaagggcagcgccgctttaatcgaaagcacgcgccagtatgctcgcacgcgcgcaacggacatcgacaccgtttccacgcgcgccaccaccagcctgaacagttacatttcgtcacataacaaggtgcaggtatgcggcgctgacatttaccacaacacggccgttttgcagaatctttacattaaagacaacgccatttgctacaaaaacgacgatcggcagctcgccagcatctgcgcactgccgtccgagtttttatttcccgaacatttgttggacttgtttatagatgaataaaacacaatattatttaatacatttgtttatttgttaaactaacgttgcatattattagctaaacgcgcaatctgtcgctccgtcatggacgcctgcaccgcttcgacaagctgctccttggtcaaattgtctagcagcgtaattttgttgtgtttcgccttaaacttgtctcgcggcaacgattcttttaccttgttgagcacgttcatagaattaggcacgtaatcgctgcgaaacacaatgtcccgctcgcccacggacaaccgatttaaactgcgctgaagactgcgccgctgcggtcgtacaaacgcaaactgatcaccgcctaaatcacacaccgctagcgaatggagtaattgtgggttggccggcttggtaacaacgtcttgaacaatgtccgccatgcggttggccagtttgtccgatcgttcggtggcggcaatcagcgcctgtgtcaacacttgcgtttgtgccatcagtgcgttgttttgcgttaccaacgcgttattgcgctcgttggccgccatgagcccccttgcaatctcagccaagtcggtgttagatttaattaaagccgtcgacagcgtttcgtccgtttccattttgatggctggcgcgtacttgccagtgcacagcacctgcggaatcacttcttcaaaaagccacgcctgcaattctacggcgtagggcagcttggacttcatgataagttgaataacaccttctttagtaatgagcactgtactcgggtgtaagtacagcgggtcgccctgtttgaccgcgctgtttgcagcaagggccccgttttcgggcgcttgctcatacgtaaatttgtatttatcgtcaacgtgttgattcaccgcgttgcgagatttttcgtaacccaaactgttcgcaacgtccttggccacaaacttgacttgttggtcgcgctccaacacgtaccgcagcgtgaacgtgtcttcgccgaatttaaattgaccaatttttacttgagtcattttatttatttaaacatacgttgttggtcaacgaccgcaaacaacacaatgacgcgctcacaactcgtcaatggtatcgcggacggaagggtcattgttccatttgccgcgcgtgccatctcgacgcttgtggtaatgattgtgtccatgatggtgaccgtgtttgtgattgtaatggtgaccgtattcgtggccgcggtgccattgattattgtcggcttgcgaattataatatccacggcgacgtgtgcgtgtgcacgattcttcgggaccatcaccgtttccgttgctgccgccgttaccgtcgcccacatcctcggcgtcatcgccttcgcaatcatcgcattggtcctgatcttgattgcgcagctggtcgcgcacggccttggcggcacgtgcgtatctgcattcgtcgttttccgtctcaaacatgagatcggcgcaattgtaaaagccctcgcccacggggtcaatgcgctgccaacgcacgtacattacaaactggcctgacctgtacggcaccgtgacgggtatcgaatacacttggttgctatcgcaaagcgggtcgcccgggttaggcaccaacgccgagttgttaccgccaatatactcgagctcgttccacgtgatggggttgcgccggtcccacgtgggcttggttataaacacctcgaaatagcttggctcgtggatggcagtggggcaaaaatgcacgtccatcgggtacgcgttctggtaacggttcatgtacagcacgtcgggtcgccagttgtaaaacggctcgtccatgccgctcttgtcgccgaacaaggcggcgcgatcgttggacgcggcgccgcacagcgtgtgcggcactacattgcgcttcaccatttcaaagtcgcgataattggggccagccaacgccgcgtactcggtgtactgctggaacatgtactgcgccgcgctggcggcttcgcctgagggcacgtttattgcccggtacttgtaatacacctttttgtaagcattacgacacgcctcatcgggaatgttatcgccgttattgggccaccaaaaattaccatctctaaagcatttgtattgcctagcgaccggcaccgacaggtagccgtgcgagcgcactgcgggcgcaaaaaacagcgcaaacaaaactacgctaaatttgttcattttttatttaaaacttaattatataaaaaacttaattgatacaaacaagtttgtttttattttactttatacaaacaaaatttgaacgtgttgtttgcgcacttggcttcgggcgggccgtcctcatcttcttcttcgctgtcctccgtgtcgctgcttggcgctttgcgtttcgacccgcacgctaccgttgttttacgctttttgcagtttccctcatctttgctgttttgcgctttacgtttgcacgcaattggaactaataaagcgcgttttttgtcgtacatttgattctgcatatatcttgcaagaataacctcgtaacattcagcaagcaaatctttatgctggtcaccaaaaatttccaacagctcgttcataaacgtatttaatatggtcatgtgtttacgccaactgatgcgattcgtgtttatatcaaacaagcgtaaagggtaacttttttcagtaattttaccctcaatgtcaagcagcacgtacggaatgcggtcgccgttgcccggcacaaagtccgtgcctttactgattaggatttcgcgacaatggcgcgcggcggtaactacgcgccgcttggccggtgtaggtgtttcgtccgcttcatcggcgcgtcgtttgtttgctttgccagcgttgtcattgtacgtcatgctaaaactgtaatcggtcaaaggtttgtcgccgccaaacgcgtcaaaatacatgagcatgttgttttgcaaactgtttaaacatccgtgcaggtcttggcggcgcaacacgtgttccatggctgatctaaacgccacacgcataaacactggcatgtccttcttgaccaaccatcctttaaacacaatcttgccgttgttgttaatgtaacaatatttcttcttttttaacagcacgagtacgctcattaggttttcaaacgccatcttgtaaccgttggtgaattggccattgacgcgcgcctccacggccgcgcaaatgcgcgtgagcgtggccatgtgttgttcttcgagaatctcgtcgcgattaaacgtgggcagcacaaacgtcgagtccgtgtcgccgtagagcactttgaacttgagcgtggtcaagccaaactcgcgcagcagctcggggtcgtcggataagccttcgattatgccgatagccgcggtcagtttttcgcggcccacccttgtaatgtaattggccaacgccttgcagaaaatgccgtaatagccgtaaatgctattggcagtgcgcttgctcaggttttgcatttggtcatacaggtcgtacaaaaactcagactcaacctgattatcacggcatttctttagtatcgtgcgctgtttaagcagtttgagcaacagcttgacgtttatcgcttccttgtcttggttaaggtacacgttgccgtcttcgcacaaaattaggtttgtgagacaagcgcaaatgtcaatcatgatagtgaggtacagcgagttaaagtctagcgaaaacgcgtactcatacacgccggcacggggctgcagcaccttgccgccctcatatttgaccgcttcagcgatggcgcccaaacaaatcgcgttggcgggcacgtctttaaatggcgtaagcttgcgttgcaaacgcgacatgcccgcgttgccagacatgtttcccaaatcatttttgtcgaaaaaataaatatccggttcgtcgagcccggtagacgggtttgtgcgcgtgttggtcagcgccaggtgaaaaaacgtggtgctaatcaagtgcgaaatgttgcagatgaaatcgtcggtgcacaagcgatacattaaacattgcgagtacatgaaatcgttcagttttagtttcaaaaacaatttaatcggcaacaagcaatcttgcacgttgtattcaatgatggtgcccagctgcttgttgttgtacatgcgcaccatcgtttgccaatccaaatcgaccttggcatcgcccaagtagtatttactgagcgtgttcaattgaaagttttccacgtcgcgattgttagcgtctacgccaaaatatttgtacaggtcaatgtgaatgtaataattaaaataatacgtgtccgttttgttaccaatcttggtgataaacaacttggtgttggactgcaaagggggcaaatcgtagcggcgcaacgttggtttgttaccattcaaacgcgcccgtatgtacggcaaatcaaacacgtcgccgttgtagtcgagaatcacgtcggggttaacaaactttaaaaaatcaaaaaaagacaatatcatgtcagtttcgttacgaaacacaactacgtgcgtgtcgtcgtttgtgtgcggaatttccaagggttctttgtgatacacaaaacagactttgtcaaagtggtcgtccttgtatatcgacaacccgatgcacatgatgacgtccacgtcgggtttggaactgttgtgtccgtccgaatgtgtttcaatgtcgtagcacgccatcacgggcgcaatgttagtattcaatgtggccgggtcaacgatttcaaaatctgcgtcaaacttttcaaacgtaaacgggtgcgtgtcgtcgctgacgcagttgttgcggcaccgttgcgcgcgtcggaagcgcatgtacgtgccttcgatcacgggcgtctgcatgtgcaccctgttggcgttgcttaaaaacttgtccaaagcattagatttttcttcgtacgaactgccgttgcgcttaaacttgatcacgttggtcttgtccatgtgcacgccttttacgcccggcgcgacaaacgtgttatagttagagcagcggttgcgacacgtggaaaatatgtgattgttgtagcattttttgtacgagtacaagtccatttttatcacaaaataaaattgtaacacacgaccgttcatgttaatgttgcaaaacgccaacagcttgcccttgttttcgtcgtagtgaatgcgcatgacgcgaaacgcgttgtcgcacggtacatcgtaagtgtgcggacagtaatcgcgaaacgcctctttcaactgattgtaagtgtggattttcattttagcaaaatgcaaaaatacggagccaccgatgttagctcgcgcactgttcacgatctactgaccactatcaacactatgagtttgcgtataaaatcgctggagcggtatgagcacgcgttgcgtgaaattcacaaagttataataatgatgcgtccgggtttcaacttgcaactgatggatcttaacgctatgcccgcgcttattgtgcagtttttctccgacatgacgggccgcgacattacgcacaacattaattacaagtatgattacaattttaacggcgcgcttccgtttcaagcgcctccgccgcaaccgttttacggtgaacatgggcttcaacaaccgccgcctcagccaccgtttcaaccgccgcctcagccaccatctcaacagccaccgcctcagccaccatctcaacagccaccgcctcagccaccatctcaacagcctcagccaccacctcaacaaccgccgcctcagccaccaccgcagcaacctccttgtcaaacaattgtgcctcaaatagagcttaccgttgacgaaatgcgcgagctgcaaaatgtatatcaaaacatgcagcagcaaactattacctgggaccatttaggtgtatttgtgacgactatggttcgcattatgcaagtgcgcgtaataaacagcgtgactatagtcaacgcaataaattcccttcaaaatgttaccatcttgaccaattttgattttaacgatttcttgcggtgcgtcgcaagggaaactgcccttcaatttaccatttcgttagacctgtgtcgcattatagtggcgtttattcaattctttcaaaacacatatttttccataacattaacattgtttacatacgtaaacttggacggtttaatcgtgtctacaaactcaatgcacgtcattattgtacaactatatgaattttttactaaaatctattttttggtgatgcaaacgcgttttgtctacaccaattctgatggttttgttcagacgaccgcaatgctatatagcagagttgaagcgttaacagcatccgcgcaaaccaccaccgttgtgtcaagtttgcaagaagaattgcgcaaagaaagaattaaagtaaataatttggatagggaaaaaaacagcgcgttacaaagtgcatctgattatgaaaatcgttacaaaaatgtacagagtgagaatgaaaatttaaaaacacaagttgaaagattgacacctttagagaatgaatcacggaccttgacgttggataaagaagagttgttaagtgaaaacaatcgtttaaaagaagctaacgcaaaactgcaaaacgacaatacagaacttttaaaacgatctgctcaaaattttgaaaattttaaaaatgaacaaattaaagttaaagaagaacaagaaaaaagtaaagatttagaaaggcgtttacaaaacgtcgaagatttgcaaactcaaaatgtaaataatgacgcacaagacattatttttgaactgagacgtaatctaaaagaaaaagaaaaccaattgcaagaagctaaaacgtcaaactctaccgcgttatctaaacttcaatttcaaattgattcagacgcagctacgtacagggcaaaattagcatctatggaacaagagtttaacaaaacaataaatgaaaggaataacactataaaccaattaaacgaagcattagttgcagccaaagcacagtatgacgaattaattacgcaactagaaaagggtcaacaagaattaaacaacacaaatgaatacgaaggcaaaaaattcggcgacgacaccgacaaaataatagaatttgcacttacagctttagatttaatgtataaaagagtgagagaaattgatccaaatttgggcaacggtgtagatttgtcacaaaatcctaataatatgaatttacaattggccgaacaacaacgcgatctgttaaacaattggtttgtaagtttaaatcaaaccatggctactaacgacatactaaactttaactccgttctcaacatggctagtgtaaaaaatcaaattgcacatattattccggccaacatgttgctgggacccgatggcaatttgatgacaccccaacaagtacaaaacgctgacaatgttgttcttattagtgctgtaagtacgttagtttctgaatacaataggttggccggtgaagtatttaatttaaccgcaaatagcgccgcgcaaagcgaagctagcgcgttaatcgccaattgctcgcagcaaattgctgctctacaagaagagttaagaaaaaacaaagaagactttaaaaaaattaacaatttggtacaaacgtcctcgcctcaacttaacgacaaaaccatacaatcaatgaaaacggaattggacactgccaaaagtcaaataaataatttaaaaaaggccactactgaacaattaaaacaaatggcagacaatggtgtgcaagtggaaatgagcaaattaaatacacaaattgacaagataaattctttattgttacattatcgttcagttacacaagatatatttgactggaaaacaaacatgatggaattgtacgaatcgttggcgcgcacaaccgccgaaatggaaactatataaaactatattcgttcatgtcttcgtcgtatttgagcaaacttaacatgttcatattgtttgcttccgcgttgtctacggtcacataaattatggcgttggtcaagttgtccgacaaacacgtggccaactgatcaaaatccatagaaagcttttgcatcacattattgtctgcttcatctttgccgtcttgtttgttgttgttatccaagtagtaaacgcatttgttccatttaggctcgtcagcgtcattcgaatcaatcgctttaaattgaactgaaaaactttctttaccattgtcactttcctttggatccgctttaaactgcgacagttttatgcacatcaagtgtttgtttgagcggctaatgttattggtggcattactatattgtaaatttagataatcatcgttgtccgtgctggtgggcgtttccaatcgtgttatttggcctgccacccaatttaaaaaagcgttagttcctttgaccgtgtgctgacatttaaccccatacacattaaaaagttttccagaatttttaaaataaaattccattaattggtcaaaatcttcgcaattttgcacgtgccccttggccacgctggccaatacctttgcgttggcaaaacattcaacttgctccacgcgcacggcgccgcccgcgtccgccatgttaatttcaaacaccattttgtaattgtttgcgttcaaccgcttaaacacacattttagcttggccaacacgttcactacgctttcgtcttcaaaatcagtgtgcttcaaacttaactgtacttgagcagcagtatcttctataggcgtgtcgcatttgacatattcgttaatttgaatccattctttaaacttggttttgataaagtttaagctaatgtcgtagcactcgccgttcactagttctttaaaacattgcaagttgccgtagtacgcttccattttgttgtcaatcaaaaatctaaacgtgtaataacgttggttatctatgctcaaagttgttttgttcaacagcttgcctgtgacgcgcttgtagttttcttttacttttttcttcaacggctcgttgcttgccgtttcgtttgtgtgctcacgtttggtggccattatgtgggacacggtgcgctggcaggtgttgagttccaatgaagtagaagtggcgcctgaacaccgcgcgttggcttggcgtgaattgattgcaaacgtggccgacggcaccccgctcgattacacgttcagaacaatgtttcaacgggcagattttgagaattttgattacaacacaccaatcgtgtacaatgttaaaaataaagaattgatcgtgctaaacgaaagaataagagccgcgctcaatagacccgtccgacgcagcgaccgcacgattaatgtgaacacagtgcacgtttttttgctttttattctagccgtgttgctgacggtagtggttgcgttttggggacgtgatgccgcaccgcgcaatgttgcaacggaaactcgaaaaacttaaacaccacctaaccttgttcagcgacgcgcaaattaaacgtgcacgtgcttgcctgttcgacgacgcggtaacccgtcgaccgcgatgttggcgcaaactggccgagattgacaaacaatttaaagtgtgtcaaggcgttaacacggcacttgacttgtgtggtggaccgggcgagtttgccgcctacactatgtcgtgcaacgcgtcgtgtcgcgtgtacggcgttacgttggccgcaaacgcgccgtacaaacgcacggtgcgcaaccaagccaatttttgcgccgttatgggacccgacgcgacgggcgacgtgctcgataaaaacgtgttgtttgatttgagcgtaaagtgtggcaacgcgtgcgacctcgtgcttgccgacggcgctgtggacgtgaccggacgcgaaaacgatcaagaacgactcaacgcgcctcttatcatgcgcgaaacgcaattggcgctcatttgtttgcgtccgggcggcaattgtattatcaaggtgtttgacgcgtttgacgacgaaacgataaacatgttggcaaattttgttcgccattttgcgcgttggcgtttagtcaaaccgccttcatcgcggccctccaactcggaacgctacttggtgtgcattaacaagttgatagttccacaagcggccggcgatcaagtttttgtaatggcacgcgcgtttaaaaaattttgcacgttgcaatgcaagtatctaaacaaattgttgtgcgagttgcaaaaaactaagcatggatttaaaaaagtttaattttctaatattgtccacgcacgggcgcgccaaaacgatgacgcccttgttgttagacaacgtgcaaaaaatggatttggctaaaacgggtttcttttttcacaacaacatgctcaagtgtatcggttgccgcacaaccatggacaagattgacgccaaacgcgttaaacgacacacgtactctgattattgcatttcggccaccaacgcgttgctggccaacgagagtttacgcaaacaatcgttttgcagttttaaatgggcgcgacggcaattcgcgtctcagcccagggtgattgacatgttgagtcggcgcggttattattgttttggcaaacgacttcgttgcgccggctgcaaagccgtcgtcgcgtacgaatcggtggacgccgcgcaacgaggccacgacgccgtttgcgcgtttcgtcacgtggttgacgtcaacctagatgaatccacatttaaagtgttggaggcggatttgcccccgccgcgtttagaacgcgtcgagcccagcgcgccgcaagcagatagcagcagcgtttccgaatgcaaagtgtgttttgcaaacgaaaaatcagtgtgttttttgccgtgccgtcatttggccgtgtgcggtacatgctctccgcgctgcaaaaaatgctgcgtgtgcaacggcaagatcaccagccgcatagaaacaataccacaataaaaataagtctttattattttttgtattgtatgcctaatagattattaacctactgtaaattaaaatttgttaaacgggtgtcaaaaaccgtttttactctgttgtgtaaatgtgtaacttgtttagagcctaaaaatacaacaggtgatcgttatttacacattaacaacaattgtaattttatttatataaatgtggtaaacagtaattaacaaaaaaatgtaaatcatatatttttttattgtaattaaatcaataaatataattaaacaatttctaatgttttgttttagagggtttaaattttcctgttctggatcaaattgcaaaacgtttgctacagctaataaattatacaaatcagtttccatggttgataaagcatccaacgttgcgtcgctatcgttgagaagcgcttgaatttcatgtacttttgcaagtgcgtcttcttgcacgacgttcaatgtggcttgagacgtcgtcattgtggcggcttaaaatttaatgtgcaacagttaaacgttgacacaatgcaatttggcttaacatagccgcaactcatatcgtacctaacagcgtcatcgctcaattcgctgtttaacacgttgattaccgcatttttaaaagtgtttgactgcgtcattgtgactgttgcttgcaattgttcttgtaaaatcttgtaaatgttgtctctaaacgctttgtcggcggctaattgcgcggcgttagcttccagccacagcttgaacggttcgtccacaaacaaaccgcgcataatctcgtacaattggcggcccaacgaatatacttcgtcataatctttcatgttcaattgcttgctcaatgtcattacagaaaagtccacaatcgcttgcagctgcttgtaatattccacataggccggtttaagttttaacccgtccaccgtatactcttccgcggcaccgtgcacagttttctggtcgggtcgcgcatcttgcacggtagttgaaatgggattttcgcagctggtcattgttgttaatagatcttattataattggtatacttcgttcatttgcgttaccaaaaaattggatagcgcactaatgtcttcgcccgacaatctgtagccgtccacaaacgtttgcacaacgctcacaatcttgcggttcgccagaaacgcgcacactaaataatcaatttgtttctcggttagctttttggacgaatccaccgtgcccaccaagttgtaaatgagccgcctgtcaatctggtgggcgataaacattttaaacacgttgcgcagtttgtcaaaaaagtgcgggtccgggtacacttgctcgttgagccaattgtcaagggtggaccgcaccatgctcactttggtggcaaacgtggtggacttgactagttcggcaaaaaaactcttcatcatgttggtcatggttgtttcagtcaagcgagctggtgtttttgtttaaaattgcgtcaagcgcttgttcaatttccaactttttccgcacgctcttagctttatggctgggcaggtcgtccacggccgactcggtatttttacttattagggccggactgaccagcacaaacactagcaccagaatgagcaaataaaacgcaataccgttttccttcttgtcgtacaccaggctgaacacggccagcgcgcccagtaacaagtacagattcattttgcccttattattcaccggcacgatagtacagggatgccgaaccgccagacgagccggctgacgagtcgcggttgttcaactctgattcctcgtcgctgctgctgctttcgtcaaaattgtacttgtttaggtacggtttggtactggccggcgattcgtggttcatcaagcgcgccactttttgcaacggcacgccgctgttgtacaaattgctgctcaaataatgtcttatcatgttgctacgtggccgttccatctccacgcccgcttcgtccagcaagcgacgaaagtctttaaagggcgtagaagtgtttttagagatttgcaacacggtggggttgcgcgcgtaaatctcgcgagccagctccaacggtttggttttaattgtgttgagcgtgttgttgcggctgcgtttgcgttttaaattgatagtgttgctgcgcaatttgccttttttgattagcacgttaagatcttctacgctgagctggcgcgcctcgttgatgcgcatgcccgtacctagcattatgcaaaatactatggcgccgcgaattaggccgcggtcgtgcacgtaatcgccgtttagcatttttattttggcattaataaaatctaaaattgtgtctattgcgtttttgagcataaaatttttttccttttctcgaatggttttgagttctttgtcacgcggcagcatgaccatgcgcgggattttaaattcgggcaagcccatagcgttcgtgtaaaagttaatggtgagctgcagcgtttccttggtcacagaccttaattcaagcatgcgtttgcacagctctttggggttcacgagcaattgttgatattcaatcgaatcaaattccctttttaaagaatacgcggtgttttgcaagtccggttcttcaattaggctaaaaataattttgatgagacgcgatttgtagcttttgagtgtggtgggcgcaaacggtttgggaaacatgtacttgctccacaggctgtcgttttttacctcgtccggcgtgcaccgctgtcggtcggtggccaaatcaaacacgtgctcaaattgtggcgctgattgaatacgcattttccaatcgttaaatgcattttcgttgcgtacgttcaacagctcgttcattgtaattaatcaaatttattaaacaaaaaagaaggatcgctgttgtcaattgtgtcggaagaatattgcggctcttctcttaatattacaaaataatagataacatacaatagcaaaaacaaggcaacaaacgccaccagactaatcagcacgattaagccggccgacatttggcccgtgcgcgtttcgcctttgtgcgcgtccgaatactcgtacataacaaagtcgttgttgttgttgttgttgttgttgtttacgggcgcgtcgtcgttaagcgctagttttagcggaatgtattcgacgcgctcgtggttgcccaaacggtaatagggcacgtccaagttcatgatgacaaatactgatgcaagtgttgaggctgcgctttaatcaattgcaatttaaaatatttcccgcgtttacgcttaagattgtattccaattgcgcggcggtcttgtaatcgtacgcgtttgcgctgcaataaagtaaacgcaaagagtttgcgccgcgtaaaaaacgcgcaccaacgccgcgttcgtgttggtgcaaacgtcgtcgcaaattgctggtgatgcccgtgtacagtttgccgtcgtctcgccgcacaatgtacacgcaccacactttgttcttgtacaaactcataatgcgcgcaaacgcggcggattagtaattgtcggcgtcagttgctttacaatcatgaatatgaaccgggttagcgtttcacactgcgccgctaattgagacaagctcttctggcacgcgctctgcgtcaaatgggcggccggcgagttgatggcgttggcggccgacgtaagaaacgccgcgttctcaaacatgtcgggacgtttgccgtgtcgcgtggcaagttgagacatataattaaaaatgtccgcggacgcggacagtggtgccaaaaaacccacgttttctttaagccctacgacgcgcgcgcgatttttttcgttgagcacgtaatgataataattgccgccgccagcaaacaaatcgtcaatcactgaatttatgaggtcattgatcatgttgatgtgcacaaagctgcgcgacttgacggcttcttgcacgttgtcaggtagcgtggcgcgttttaaaagtagtgtcacataattgttggcaagctgctggtcaaacggcaacgggataggaatactgcacgtgaccgcttccgacaccatgtactgcacagccagactaagctgtttggccgcctcgttaagcgcgtctttgccgagcgtgtctgcgccaccgttataaaatttttgcgcgtacgctggcagcgaattaagtacaaacgacggctgaaaaatgttggaatccgagtcgatggactcagccacgctattctgacgcagttctttttgcaacccaattaggtggcgaacaatctcttcgtcagtttgcacgcgcttgattatatttacgctaacagggttgctgtcaatgcacatatcgcgtattgtgttgatgaaatgaatcatcaaaggagttaattccgacatgtcgttacagcgataatagcgaataattttgtgtacatagtctgtgcacttgttgtaccaaatagattcgccgctggcgtcttctttagttttaacaagcgagtttgcgctgccgcgatctgtccgctgcaccattgtagacattgtggtaggataattaccgctttgcgaactagtaacggtcgcgctggtgggtgcaaacggatgtctcgcaggcgcctgcgaagcgttcaaataaaagccgtcccgttcattcatggttttttaatgcgttcttatgattgcaaaatacaacgtatggattacttataatataattgttgttacaaaacagcgctactaaaagtaacaaaatgacaagcaagtttaatatcgaaaatttttccacgttaaacaacagcaacagaatggcgcatcccagcaaaagcgtttgaaaactgacacgtcgacacaggatactttcgcaattgcgaaacgccacgttgaagccgttttctcctttgatgtatctgcgcaattccgctttacagcattcgtcgcacataatgtgcacctttataatgatcccgtcggtgtgtaccgtttgaaacgtgcgaggctgactgccggggtgaaattcaaactcgtaaccgcttgaagtagaaatttgcgcaaaataatgtgccaaaatggaagcgcccgttttctttacttttactttgtaaatttttatcacattcaaattgcattgttgtttgtcggtgcgaaacccctcgtacaaatagtgaacaagcagttcgctatcgtatttaatcttgttcaggctcgtccaatttttgctttttgggggacggtggtgcgtcgccagattctggcccaaagcgttcggcgacaacgctttctttttcggcggacccatggtgcggcgccggcgtgtcggcaagcttcttattattccacagctttagtctaaacacaccgccgctcaccaacacgtcgtcttgcttgacgctcaggagggcttgcgcttcgcgccggtcgcggcttgaaagattaaactcgacggtgtactcgccacaagtaattactgcatgaggattgtcatgcaacgcctccaattcgtctgaaggcattatgcgcacgtcgtgcggccccttcattaagcggtgttcgttttcggcgccaaactccaacacggtctcgccgtcgctcgcgggcacaacgcgcgccctcactacaatgtcagacgtggtgctgttagtgcttgccattatcttgataattatttttgcgttaatttattacacaatattttttgagtttgacgaaacgaccttttctaaacgattgcaggtgttgactgaatatgcaaaacgaacaaacgcggacaaaccaacaccggacgtgctcggccacgtgtcggatgtgtacgaacacacttatatagttacgtggtttaagaccgacgacctgagcacctatcatgaaactgtacacgacgacacggttgaggtgtttgactttttggaacaaaaattcaacgccgccgcggcgacggtcgcgcatcgcgtcgcgcccgcggtcaccgaacccgacgcgtttgtgttgacgggcgatgcgggcgacgtcaaattgcgttgcccgcagcattttcgttttgattacgcacaattaaaatgtgtgcccgtagaaccgtgcgaaggtcgcgcgcccggtctctatcccatggacgaacgggccctggacacgttggtgcacaaccagcatttggacaaagattattcggcaaacgccaacttgcaccatcccacgttgtatttgcgatgcttggcggacggttcgcacgcggtgcgcgaatgtcccgataattacacgtttgacgccgcgatgggccaatgtcgggttaatgagctgtgccaaggtcgaccggacggttacgtgttggattactttcccgaaactttattagtcaacgagtttgttgaatgtcgtgacaaccaacatgtcgtggcgcgatgcccggaccaacaggtctttgaccgcgtgcttatgacgtgcgtggaagcgcacccgtgcgcgtttaacggcgccggacacacgtacatcacagccgacattggcaacactcaatattttaaatgcatgaacaaccacgaatcgcagctaatcacgtgcattaatcgtgttcgcaacgccgatggtcaatacgcttgctcgggtgacgcgcgctgcgccaatttgcccgagggcacaggccaactagttcacatgcacaccgacgacacatttgagtacgccaccgggcaaatgacctgcgataatttcgaggtcatctccgagacggaatgtgacaccgccaacgtgttggacgacaaattgtttattaacaagtttaaacttgttgcggaatttccccgccaagtttttaataacggcgtgtgcgcaccggcaacgttgaccaacgtgcgcacgttaagcgacacgtttcctattgagaatttgccaaacgattacgacattgacatgcaaacgtctatggtcgggttgacgagcatgattccccgtttgttggcgggcaatgacccggacacggcgttcggggaaaatctgctgctagcgcgtgacgtcggcgccgtaggcctcaacccgttcaccggcgaacccatcgattgttttgggccgcaattgtatgacgtgttgaacgctagccgcgccaacatgtgcaccgaatcgggcgacggcgttttaaaaacgcttgaatttggcgatggcgcgtttttgagcgtttttcgcaacgatttgagcggtttggacgcggattatgagcgtttttgtgcaatatcctacgaaaacccattaaaaatcgtaaaaagcgaccatttacagcatcgtatattgaccaatatactacaatcggacatttgtgccgatctatatactacgatgtaccaaaaatatactacactggcacagaaatatactacaactccgctacaatataactacactctcgtaaaacggcctcgaaatatggtagtatatgctgcaaatatacatttaaaaaacgctacgatttctaaaccagcatttgatcccttcgcaaaacagccatccgtcaataaaagcgggctggccgaacccttgtttgacccgtttgcaaacgccgtctggtacagcgagcccggcggcgacggtgaccattgggtacccgacccaggccccaatcctcaacccgaacctgaacctgatgaatccaaacctgattctgaacctgatgaatttgaaccagtgcccgaactttcgcctttgattttagataaaaaagatttgttttattcgtgttattacgagttgccgagttacaaattaactagttgccatgcggaaaacgacgtgatcattgacgagttggcacgattgcgaaacaacgcaaaggccgacgccgaatgtgaattggccaaagacctgcattacgtgttaaacgcgtatgtgtacacgggcaacggcattgggtgccgctccgtgtttgatggtaatgacgtcaccgtaattaaagagtcaacgccctcacacgtgtacgccaacttaaacacgcaatccaatgacggtgtgcggtataaccggcacgtgcatgtcaaggacggtcggtacatggcgtgtcccgaacacttgtacgacgccaacacgtttatgtgcaacgccgaagcggacaaattgtattatttaaacaacatgcaagagtaattgcgtcattataataaaaatagcacgcgcgttttacaagaacaatcgtatgtgaaaaacaggataaataatatatgacgcaataaactgcggttggaggtttgtaataaaatgtaacggatcgcgcacaatccaatcacacaacccatttgtctgcaacatgaaggtctcatttgttgtattaattattttactgtggctggcaaacgtgaaagttggcacgtcggcacgttggcggtatgtgtgcattaaagtttagttttgtacaattaattttatggttttaatttattttaatgtgttatacagtttcaatggaacgcgacacacaattggtacgcgcatcggctggggcggcaacgagcaagaccctaatttgtattattaaatatctaatttttaatatttaataaatgtaaagtatattaaaaaaaagtgttttatttgctttaaggttgttgtgtactcttcaagttaataaactggtttggtgaaaatcaatttcaattccaatttgaacaaaattgcgcttcagaccgtaaaccgctagggaaatttattgtgatacaaaactaataacataaatgcgtgtcgggaaacttgcgcaataaccagtatttaataaagacgtttttacgcagtttaccacttcacaatgcagactaactcaagtaataacgctagtaaattaatatttctgaaagcgttagatttgcaaccttgcgatccagtaaaatgcgtcatttacaacattgctgaaaaatgtagtgccggacttgcgacagtggccacaatcaagcgcaaattgaggtgttttgatttaactcaggaccagtttgacgaggcgttgcgtttgtcgttgaaattaaaaaataaaaataattgttaaatacattttatttattatataaaattattatgttaacatttattaaataaattattatctttaatgagtttaatgttttcatttgttaactgttggttttcctgctctagcttggcgtttcgttccgcccattgtgtgcgcttatcagccagcgtttttaaagcgcgttcttctttaattctggtgtttcgtaccgcttccatttgtttgcaagcatcattgtaatcgttgcggcttttttcaatacggcgttcaattgcctcgttggttagcgccaacgtttccgattgcaaatgcaaagtgtaattgagtttagtttgttcatttatttgttcttgcaagcgcgtcaacacggtgcgcaaatcatctggtgtggtagcgggttcgttatattctgtttcgagtaaaatacttctttcaaaaacgttgcgtgccaacgaacctgcgtccaccatacatcttgggtagacttgctcgcgcacgtcgtttactccgcatcgcaacacttcgaccacgttgcggttgacactgtacacgttaaaatgcgcgtttttgcgtcggcacatgggacactctaagcgtttgtctctgttgcgctgcgcaatcttgcgaacgcaagtaacgcacatttgatgtttgcacagatacaattccacgatgggcaccatgttgattgcatcggcgggttgcagaaaattattttttatttctgccactgtataacagatgtgacactgcaacctaaccatatccattgtgtttaggcagcaacgtttgctgcgtcaatatccgctgcgtttgcttgaacgttgatgtcaacgccgcgaggcggcacaaacgcgcgccgagcgggaacaaaattgtttgcgcgtaaaatgtcgttttgcaaattgattaattggtaacccaaaaacaagggcacgtacatgggatattcttcgtatcggttaagcgtgcgttccagcgcgcgtgtgttgccttcaaattttaaaacggttctgagtttcaaacggttaggacgcgtttgaataatgtccgaagcgcgcaccgggttatacaattcggtgccttcaacagtggccaccaaacctctgttgtcaattaggcatgtgctgcaatttcgcaagcgcaaatcttcattgtcaatttgcagtgtttcgggtgccactgcacgacgaatgagatttcttaaaaatccgggcagattgttaaacactacgtcgccgggtccgccttgattggcattggtaacatcaaagtaacgcacgtcgtcgttggccacgcgcgagcaatacgcttgtgggtctgtaagcgacaaaatgttacgggctgaattatacaccttttccacgacgctgtacgtgtcttctaaaaaactttcgctattttttaacgaattgcaaattcgttcaatttctgtacggttatcataaatcatgtgaaaaataagttgttctgacaacattttgctagacacgtttaacacttgttgataattagtaaatgtgggaattaatatacgctttagtcccgtttctttgtgcccaactaaatggcgagctatagtgcgcttgtactggttgtcgtcttcgtcaaatatgggcaaaaccatttttgacattttaaaatccctttttaaatggttattgcaataaaaataaccgtcatctacggacgcgtcggccgagcacatcgacttgtacgtggcgcacgggttgaacgagtcggcgcagcccatgaggcagtggttcgtcgaccgttgcgacaacacgccgggggatacaagcgccattttttgctacaatggacgactttgtgattgagaaagaaatctcttatacaatcaatttcagccaagatttgttgtacttaattttggattcttatattgttaaaaaatgtgattcaccaaagcgttacgtagacttgtacgacatcaacaacgtgcgcacgcgcgtggcggatgacagcataataagcgtgcgcaaaagcaatttgcgtgacgaaagacttgtgtattggttgccgtcgaccaacgcgttggtgccgcttgtgtggcgcgaaaaccgtgaaactacggtgccgcgcgaaagcgtagagcgcgagattaaatcgtgcattgacacgcttgtatacaagttgggtggtattgaaatcaagtttgaacatgtgtattttcaaaacaattttgccgaccgatacgagccaaccatggcgcacaaaattatcgcattaaaaaacgcgttgcttaacacgcaatttgcacatcccactcaaaacctgcagcttggcagcgacgccattctggcgcgcatccggcttgaactggaatttgcggacgttgcaccctccgccgaccaattaaatagtttttgcgagttgattgtgcaaatggaagcgtttgccgattaccaaaacattgcgcccagcttgccttacaccacgttactcaacaaagtgatgatgcgcaagtttaatcgcgagcaaaaaatcacctacggttctggcgatttggatagcgcgggtgtaaaaaaatgggctatgaaactggacggcgtgcgcggtcgcggcgcgtttaggcgtaattttatgatcgtgcaaacggacgacatgcgcctatattcagctaaaattaacagtccctttggccttaacaacattgtgacgtttcaatgcgaggttgttgacaacaaaatttatgtaacagatttgctacaagtgtttcgctacaagtacaacaaccgcacgcaatacgaatgcgatttgcacgacccgtattcgctaaacgcgttgacagccatcgaatgtttaaattatttgcacactaacgtaaacggcgtcgcgttgtctcaactcggcgaattgtgttttcagcagttttttgacccgcctctgacgcattcccattacaccacagtgccgatagacgggttcattgtgctggacgaacaattacagtatgctaaatacaaatggatgccgaccgttgaactgcaatacgacgcgcatgcagacacactcaattcgattgacggtccgttggaaaacagggttattgtcgcagacgtgccgttaacgcacaaagccgtgtatgaatgcgtttttactgacacggtgataaacgtgcttaaatgccgaccggacagaattgtgccgtctaaagtgtgttgagcggataaaacgggcaatcggaccgccaatgcgccacgcaaccgtcggccacaaacgaatacgcgttgtccgctagcgagttgcacgacaccgaccacagcgggatgccaaaataattgcaatgtatcacccgccggcaatcccacggcaccgcgtacgtggtgcgccccgaacttctgcacagtggccgcacaaaatcctgaagctgttcaaccgttgtgatttcggccggaaagtacatgggctcgcccaacggttcgggactaggtggcggtgtcggtgaaggtgttggcgtcggtgaaggtgttggtggaggcgtcggtgaaggtgttggtgaaggcgtcggtgaaggcgtcggtgaaggcgtcggtgaaggcgtcggtaaaggtgttggcggaggcgtcggtgaaggcgtcggtgaaggcgtcggtaaaggtgttggcggaggcgtcggcgaaggcgtcggtgaaggtgttggcgaaggcgtcggtgaaggtgttggcggaggcgtcggtgaaggaggtgttggcgaaggcgtcggtgaaggtgttggcggttcgggcacacgtttgagcgttgcgagcaaatatagagtcaaaaatataattataaacaaatgtattagcgtaaaaatgtaagccattcttaaataaaaattatatatttaatagttttttgtattgttcccaaatcatgcgttcgtgctgcgcgggcggctttttgttgcgctgaatccacttgtaatcgttgatgtgattgtgaaacgtcatacttatgtacgccattaaatttttcattaaaacgttcggcggtggcgctgccgagttaacggcttgcgcttcttcacaatacaagtctgtgaacgtaattggtgtaccgtgacgctcggcgtccaatgccaattctatcaattcaatgtgatatatgatgtaacccttcacgttcatgtagtggtcgcggcacacggcgcattgcaaaataaaaaatatattgtaaaacaagactttcatggtttttaattgttgcgttacaaagtcagaactacttttgtctcgagtcgacaccatgtcgtcaatgatcaagctcaaaaaatgtatagtgtcccatattgttgtaaacgtgtaagtaaaacttttaggttggcacgagcgcaaattgagctcggcggtcttgtccataaactcgatgcgaaattgctgcaaatcaatgtcgggcggagcgttggcggcccattctataagctgttgcacctcgtatttttgcacgtccttgtatttcattaaacacgcaaaatgatatagataagtcgcttgcaaagacaaaagcttggtcaaatgcgcagatttagacgcgcgcaacagatcaattaaccgaaacgagtacagcaaaaagctgtctttgtagcgcgaaaaaaggggcgtaacgggaatcatgtcagttaaaacagtgcgcttgttcttgtgtccggtaccgtcgtcggccgcgttgactgtcggcgacgcggcgtttgacgagccaataattcactttgaaaatattaaagaatgtttaacagacgcgtcgtgtgacaaaatgacatactttgccgaacttaaacaggaacaagccttatttatgaaaaagctatacagacacatggtgcttaaaagtgatggaaactacaacaaacaccacgtgctgtttgatttgatgatcatgtataagacgtatgtgcaattggcggacgagtccgcgttcggcagcaacgtgctaaactattgcgagcagtttattacgggcgcttttgaattattcgggttgggtagccggatcgaggtgctggtgccgcccggttgggaaaacgataatttaagtgtacttttgaaacatttgcacggcttgaacttgatagcgatagacatagtgcaatagacatgtggggcaccattttcttgttagtcgtgctggcgtttctgttttacttatggtggaacggtaaacttaactttaactctctcaacgaatcgtcacccagcctcgcgcagagcagcgattcggtgcaagtcgaccccgaaacggagcagctcaatgtgaaattaaacaacaacaaactgacgtacatgcgcgtagcgcacggcgacaacaaagtaagtcaagtgtacgtggcggacaagcccatgtccatggacgacattgtcaagcaaggcaacaaccgcgtagagaccaattgcgtgtttattggcaccatttacgattacggcgtacgttcgcctaacgctgccggcacgtccaacgacgtggcaataacgcgcacaacggccaactttgacgtgaaagagtacaagaacatgtttatagtaatcaagggattgacgcctagcaaaatgactaaagaagacagcatgttgtactttaccgtggacggtttgcacgtgtgcctaattgacgccaacgcggcgccactgtccgaacgcgaattgcgcgagctgcgccgctccgcgtgcacgctagtgtacacgcgcaattcggcggcgcaacaaattttactggaaaatggctacacggtggtgaacgccgagaatacggcatacttgaagaaccaaaagtcctacagggaattgtaaataaaaccacaaaatgttaaaaaaaatatgtttattgagacttaaatctgggcgcgttagtgttcatgtctagcttgttaagcgccattgtcaaattaataaacttgttactacgcacgtcgtagttatttttaaatttgtcttttatttgctgcaataaaatctgttcgtcaaacacaaaactcttgttggtgcccgcgttaatgtttttggacgcgttgtattgagtaaacgacgggtgcaaaaacgatttgagatgttgcgtagcgtaacctatcatttcttgcattttttcctcggtcacccacgcgttggcggcgcgcgctgccgtcttgatgtttagcatgtaaatgagcgcgtacatggggctgttgttgacgctaaggcgcgtcaggttgtattggtgcacggagtcgttgttaagcagcgtcttgtaaggcacaagaccggtttgagggtcgcgccggtatttgaccaagtgagccaaaaacaaacgcaaggaatcttttaacgtgtccaccaccatggattcttgcgggtattgcttggtaagaacgtggtggtaaatggagcctgaaaacggcaagtccgacacaaacttgtggtccgtgtacacaatcaaaaatctgtcctgtacggcgtcgtcgtagtcgtccacgtacaaaggattgttgttcacaatcagcatcttgtaattagcttcatatttgagcaaaccttgatatttgcgacttttggaatcgctgttgatcgagtcggcgttctttttgaaaaaactctcgctacatttttttagctcgttaatggtgtacaactgcgagtttagcttgctcacctccttgtcactagtttctttagagtcgcccgtgtgcgtttcatcgtcaaacttgtgcatcaacaccaacgattctagcagttcaaaaaaagttgatttaccggacatgggctcgcccggcaagtaaacagctttacggccatagttagtgggcgccaccaaaccgcccgcaaagtgcatcaacatgaacgaactggcgtggttaaagtttgtgtagcgtttgaaatacaaatagccctcaacgatgctcgtcaaatagttgacggaataatttttcaaatccactttagacaggatgacgcgcatgtaaaatcgggtcaaccaggtggtcaacgtgtccgaatcgcgcgctaaaatagttttgtcccaccataggtttttgtatttgtgcagaatgttggtcgtgttggcgtaatgtaagtaaaacttgttgacaatcacgtcatcgtttggcgcgggcgtagcctcgttcgccacggcctgctgcaggttggccaaaaacgcgtcgcggtcacaaaggtcggccattaacgtgtccacaaactcaatcttgtgaagttcgcggtgcaaaattgcggcaatcttgacgtgttctttgacaaaaaaattggcatgttcgttaaccagatcgctgccggtcagaattaacgcggtggtcacgtacaacttgttgctggacaaaatcaacatccacatcaattgagatagttcagggtcgctgacaaacaagtcaaatattaaacacacttttagcgccatgcgattgatttttattttgcggacgcatttgcacgtgttggctttcgcgccggcacggcacgggttgcatttaaaattgtgcacaatgtcttctatcttgatcttgttcacgtacaaagctagtgtgagcaggctttcgtcgtcaaagttccaaagctctctaaataactcgttcagctgcacgcgtgtttgcaactgacaaggcgcgcagttgcctaacaaattgaccgtacccaaattcaccttgaccatttttacgtcgcggcacagcttggccacgtggtaggtacgcagaatgtcgcgttcttcggcgctggtgtttaacatgtgcataaacaccgtctcgggtagatagggcgggtcgtcggggcgtttgaatgtgcccggcatggtggtgcccaacaaaaacggacaattggagtaaaattcgtccgtgatcacgttgtatacgccgtattgggtgtggtacatgtatttccaattgttaaacttgacgttttgcagcttgtgcgaattggtctttatcattttgtacaggtcgtcgtcctttttcacaatctggtagtgttcgccgttaaatatgagcgtcacctgcgtcaccacgttctctactttggataaaaaggcttgtcccaacacgtccagcggcacttcgcagtccatggccgttttgtgcgtaaacgcccacggatcgtcgcattcgtaggattcgtttgtgctgagtttaaaatagataaaataatgcgcaccatagtacgaacctagcaaataatacgggtttacgcctctaaaacagtgccagtggtcgcacaaactgttaaaaaattgaaacgtgcgcgtcacaaagggttcgcacctcgccaatgctgccgtcaacacatccttgtcgtcaccaaacagcatttcgcacacaagttcaaaaaaaagtttaacgtccgtctcgcgaaaactttttctgtcgcgtttaattatttgtttccagatgacaaatagcaaaaagtggaaatttttaaaatcgctatcctcaaaatatttttgtagcaagtcggcgtcgtcggcgcgattgttggacgccaacacttttaccatgccctcgcgcactttaattaaagccttgtctatttcgttttgtatggtttcggcgttttcgctgctggccgaaatgatggccgtgaccgcgggcgcttgaaatccacgttctccggctgtaacggcgggcaacggcgtctcgtttgaaaactcgcgcagtttagtcaggtttacattgataatgtgcttgtacttgggcgtcgtgatgcactcttcaagatttatgttgtcgcgaatcacgtgaaacaggttcttgtgacagtttaccaaatttgcggccaacttgcacgtggccgtggcattgttggccatttttatttcaaaaacactctcgcttttgtcgtcaaaaacagatttgccgttgacaaacagcttgaccggcggcgtctcgtttgtacacaaactcatttcaatgtttaaaaaagtttcggggttgaacacaaacaaatccacgggccccaaatgcttgttgtgaattatgggtatggtagattctacgctaatgtggaacttaagaaacaaaaacagctgccatccagtaaacgaaacggcttgcgacgcgggccaattgggccaataacaatagtctccagcctccacacacttgttagtgtgttcagggttttcgctgctcaaaaaactatcaagttttaagtagttcttgattacgttatagtgttttttcaataaaaaaggcttgacaaacacgcaaaaatcattgttttccaacaccaaagagtgattaatgcacgtcacgctctgtttttccgccgtttcgtcatcaacgtcttcgttgtcgtgacgcggcgcgcgttggtgcacggcgcacgggccattgccaccacttttaatggtgtttaaaaattcgcgaaaactgtttacgtgttcaaacagtttacgggaaccggtgcgcgtgtctttaattatcagctgagtcgcgtctcgtagactgttggcggagtattcttcgtcgttggtaacgtcttttaacaaacgcggcaggatgctttccattatggtggtaattgcgtttttggtggcgctttttatgtacgttgcggtagcgctgcgagatcaccatccatttctaaatagaattcaaacgttcgtgcgcgactttgacaacacgttgctgtacggaactcacgtgcaaatttacgatttgagcacacccgcgcgcaccgagcgactgtttattattgcgccgcgaaatgtagtgctttacaattttgataaaacgctctattactacctggactcggccaacgtgttttgccccaacgagttcaccgtaacgagatttacaagcgctacaattcaaacggtcaatgacacgggcgtctattcaacggcgtgcacttccgtcggcagtttgacgctaattgagcattttgccggacttaaaaacaacacgcccgatcacatgctcgtgttggacgccgccgaacagattcaattcacaatcatggacattatcaactatttaatatataatgggtatgtggatttgggcgttgcattaaaataaacatttaatttatgtgttataattatatttatttacaaataactttcgtttacacatacattgtttttttttgtggtaaattacaatggttgatgattcataatttgcacttgtgattcaagaataatcgtacttgtaaaacacattttattttttgatatgtgtcaccatatttttgctaagcatgtgtcagcaccgacctcgtttttcaaaaacgatcgtatttgtaaaacaaattctatttataggtatacgtcagcgccgacctcgcttttcaagaacgatcgtactcgtaaagcaaatttaagtttattaaaaattgtacgtgttgttgtactcgtcaatattattgacaatctgatcgtgatagcgttgccaatcgcgcacgggcaaagggcatttcttgacgcgcacgtagtagtcgtacgcaaagttgttgctgggaaggtcgtcaaccagcgtcaacgatttaaaataattaactcgtttgtcggccaagatcttgattactattttgggtgatttcggcaactcgtcgcccgtttgcgcgtgcatgtcaaatttaaaattggacggaacataaaaactttttaactcgcggtccgtggttgtggccaaaacggccggctcgtcttccgcggtcgaaccttcgctaatgatcgcgtcaaagtacggcgctaactggaccgcttgcaacgagtgcgccacatgctccttactgccgtaggaccacagcacaagtacgcagccagacgcgcgcaactcttccaagctgtcgtacacttgcggatcgcggatttgcacttcttcttgttctgtaatcagtgtgctgtccaaatcaaacacgaccacgtgcggaaattcccaaactaaagaagcgctctgtagcaacggcacttgaaattcatacatcacgtgccattcgtcgagacatgcgtacatggctggcttgtgttgaagcacgcacacgtggccaagcacgcttgttttgaatgccatctttatgcagtggcgcacttcgcacatgttatcgtgggcgttaaacacctgcatgcagtaccgcgggttggacgctatgacgttgcagaattgcgcgttgccgccgtttaattgaaacaacacgtactcaaagtattcgtatttttcaaagcccaaatactttaaatccgcatattcggttacggcaagaacatgccctcggtaaaaagcgtcgtgcaaccgcaaacacacccacctgcacttcatcgcgacttgtggacaccgcgcaccttattcacggtgtttgccgagtttcgtgccaataaaaattatgcggatttaattgattttttggttaaaaactttgcgtcacacgttaaaaacaagacgttcaactttgccggcaccggccacttgtttcattcgttgtacgcgtacgtgcccaacgtaagcgaattagtaaaagaacgcaagcagatacgtttgcaaatagattgcgtcacgcgcttgtttagcaacacgaccaatgactttaaaatgtatgtggaactgtttgagtacattgacgcgcatgatagcaaaaccgattgcccgtgtctattgttgcaaagaagtatgcttaacgccaaaggttatgttgaaaatttaaatagcaaaaggtttgacatcaagccacccaagtttaaaaaggaaacatttgacacgatactgctcaagtattcgcttaattacaaaagtctgctacttaaaaaaaaagaaaagcgcacggtaaactgcgcggtacgacgacagaaaaaaattaaacacaggcaattgctaaacgataaaataatttatttacatgacaacaaaagtttcaacaaatgcactttgctacgcgggctcagcggattgagcgtcaaaccgtgccagcacaggtttgccaccgtagaacgtcaaacgcgcgccggcgacgaaatggtgtcctttattcaatactgcgagttgtgtcaaatgcgtgtcggctaatagcggcgcctcctgtatcccgtgcgacgggtggcagaacggctgcggcttcggcgataagtgcgcggtctgcccgggcgccgtttgtaaccagagcttctgcggcgacgagtatacgtgccgtttgcggagcgggagcggcgtcgtcggtataccatagcggagtgttttacaatgtagctttaatttttaccttactattattttttgcgcttggcgggcgtgcctaaataaatgtccaattcgtcattgtcttctggtgttttatttgcgtgcttcttgacactttcggcacctttaaaaattttgttataatcctcgatgttaaacttgcaattggccattgcataattttccatggtggtgtagaacatggaattggccgcgttgtaatacattctcgacaaagggtacggatccaagtgcttgagcagcttgtttataaattcggggtcgtcgcaaaacggaatttccgtgccgctggtaacgtactgctgcggctgcagtctttgaatgttgctgccgcgttctaccagcaattcctcaagcgtcgtacgcttgtcgcgactcaaagtttcgccttgcaacagcacaatcttggcgtaacgcatcacagggctggcgaaacaacgtgcaaacgagccgcgcatcacgtctacggtggtcatgtccaccgtcgtagacggcatttctagcaacgttcgcagcgtgtcaagcattgtgttagtttgcccttccgtcaattgcggacgacatgccaaatcttcaaacgcgctttccaacagcttaaacaacggatgatatttttccgaacgctctaaaaatatcatggccataaccacgtcgcgtattttaaactcgctagagttggtcgtgttgagcgtgtaatgttgaatgagcttgcgcgccgccgtgcgatagcgtcgcatatcaattagtggagcggccgcgctagcaacagatgttggcataaacgcgttaaacacggtttgtgcaggcgcggcggcggacgaccccgctgcgttacttggcgcactcgttatgccgctgcccgccgcaaattgcgacgcaatggccgcgttagcgttggcgttggcggtttgtgatttgcgtgccacggtaattaaaaaagccataatgttggcggtgtttacgtcaatgtcaggcacggtgtcgctgcacatgcgcagcagctgtggccaaatttccatttgcatgttttcatcgatgaggcgccgcaagtggtcaatgcgtatgtgcacgtcgatcacgctcatggtgacaacttatgatatgttgaccacttcaagctgattggtgtacagatcgctcaagaactgcaacacgttgactgtgtcttcgcgattcaacttaattgtggacgcgttggcctgcagcgattcaactagtttgcgtgccgcaatagattggttgcccaacgtggtgagactggaaattttgttttctgacgaatcgttaacaataaacgttgccgccgtttgcgcgttgttaatgttgtgcagcatttccgcagccgccaagtgctggggtgaacggctgcgcggttgcgtttgatgacggcgcgaacgccgtggcggaggttccgagctatcgcctatcgaagcaatcatgattcagatcaagcaacagcgaaatctcgttgtccaactggtaatcgacaataatgcgccttataaacgtttcgggcacaattttttcaaacaacaaaactttcattatttcaactttgatctgctttagcttttctacgacgaccgccacatccttgtccgcgtaccgttttaatatataccgacacacgtttagtagctcaacttcgccagcggagcacggttcgttgtgcatgttgttgtgttcgtcttttaataggccgcgcatgtttagcaaatagttgctaggcatgctttcaatgtattgccgcaagaaaaaaccaatcaacactgtggccgccaccttgtttacttttttgattttggtatgctggcccatttttatcataaaatttttaaaaggcatcaaaagtttgtgcgcgttgggcaccgtggaagcgctgttgcattgctcgttgagcatggtcaataaacggtgacgatctttgcacggcaaaagctttataacttgtttgcaatctttcactaaaggttcgcacattttgtgtttggtgtgcagcccgtaagctttgtcgcacaataaattgtagaaaaattgtacaaacatttgtgtcatcaagttattttcgttgatcacgtcgggttgcgaggtgaaatcagttttgagtattacaaacatcataaacaccatgcctaaaatggcacgcaaaaaaatgtcccaaccgttttgcatactcgcatcaagagtgctcatcgcgtttgaaacgtagttgcatttgcacgtcaaacacgacactttaccattaatgcgacattgctcgcacatgttcacgtcgggcactgacattggattgtagtattgttttaaatattctataatcattctaaaatgaggcacctgtttaacaaactcgtcgcgcaaaaacatggacatgatgtttttgatgttgtgcacgttatcagtgctgggctgcgcatcaaagctcgtttttatttccactatgcatttgttgaattcagtaaaaaaagtaagaccttgcacgtcaatcaattgttgctggtcaaaatatttggcaagcaaaaaggctagtgaatcaatttcgtgctgttgcaattgcgcctcgaaacgcacctgttcaaagcaatgctccgagtggcgcatcacgttaaacctcaaattgtacgacactttgtaagtgtgcatgttgcatttgatattgaccttataaaatggacgatgagaaacgctcgttgttaatagccaagctcgcgggtcaaatcttgacgcgtgacgcggcagcagtaagcagggtcgtgcacacgccggaacgttcactcaacgaaaaacttgatactttacaaagcatggccgaatcgctgccggtgtcgggcggaacaccatcaaatgctgctcgacaccaaaccaacagcatcatggtgacgcaaaattatgttttgcgttatcaaacactgcgaaccgcactagagtttttgcgtcgcgcgtcgcgtatcgatgtgcccaccgagcagcttgacgagatacaacaatctcttcaacaatacgaagagtacgtgaacggcgacggatccaacattgcaattataaatgaatttttgactagcgccgaatctgcttaccaaataattaataaaaataaaattgcgccgtttcttgaattaaacgaagcagctcgtctggctgcaacaacacaaactagttcaccaagacctacacaaactagttcaccaagacctacacaaactagttcaccaacattaactagtatgccaacaccggcacagactagtatgccaacaccggcacaaactagttcaccaagaccaacacaaactaatttgcctgaaccattaaaaattggtgaggccggaccatcacaaactcgatcggaaaaattgtacgagctaattgaaaattatagaaacgacccgcaggcaattgaacgcgttaaaaacttggaaattaaaaacgttttgcgcagtatagtgcgcaatgttacttcacaagaagtgccgttttacaaaatacgcttgagttatgaagcgtacaaatctatcaaagataaaaaacttagagcgttttttaatctgtacgatgaactaaaatctatagatttttatacagaacaaaaggagccattgtttacatctcctatattagctaccgatcaaagtgaattaacagacaccgaaacggaatctataaacaccgaagcggaatctataatagctgaaggtccgtatatcacaaacgagtcgcagtttgatcacatgaatattgatcgtttggtagattatgttcgtaaaaattataaacaaaaaattaattttgacgcccaagacagcgtagatgacgtgatcgaatttgctaaaaacatttggcggcgcaaaaataatgttggacaaacgccaatgcatccgcgtgaatggcaaacgcccgcctatcaaaatgataatgatgacggttaccaaactccaatcatacaaccacaagacgtccccttgccgaagactgacgacgaaacaatgtcgcttgctcccggagttaaacgccgcagaaaacgcgtgccgcctttaccagaatattcttctgacgacaacgattcggatcaggaaaactctgactatgaaactaaacgcaaacgccaacgcgaagaagacaaaaattttttaagactcaaagctttggagttgtccaagtatgctggcgtaaacgagcgcatggaaaaaatcgtacaagtaactcgagctatgcaacagacgtacgattattgtaattgcaaaaacacaatcaatggcacgcccaacgctaacgcgtttgttaatctgcttatgcgtttaaacacatataatttgagtcacgtcgaaatgacagtaaatttttacgagttgctgtacccgctcacgctgtacaacgacgaatcaaatcgcattataggctacatttttgcggcgtctaattattttcaaaattgcgccaaaaattacgagcgtatgcgcgtcgagtttaatcaatacggaccttttgtgcaactcgattcgatggtcatgtttgtaatcaaatttaattttttgtgtgatttgcaaaccttttttggaaaaattgacggcatgccagccttgggacagcccaacgtatacatacacaacgtgttggttatgcgtgacaaaattgtaaaactggctttcaattcgttgcaatacaacatagtgccaaaaagcgaaaacagacgcgatcccaagcatcttcaacgactcatcatgctcatgaacggtaattttaatataatgtaacaataaaaaacccaataattattaaaaaacatttattttacaataaatttttacaataaatctttacaatacaaaccgtacagcctttgataatctttgtggttaaaattaaaccgtttcctgtacatattgtataacttattaaatagcggcgtttcctcgaatttattacaaacatatttttttcggcaatgacgcaaaatatcctcaaaatttaatttaccgcttaatgcgcactccttgtcaagttcatcacaatttaaaaagtcaaacggctttgaatcaatttgcaatttgtttacgtctttataatcaggtttgagtttataaattaactttccgcaccggataatgtacccttccaaaggactgtctgcaaacatttcggatttaaagtgtagagtctttacaaaatcgttgtacaaacatttacggtacggaatagtgtcaaagccagcggtttgtaacaagatttgtaccgtttcaaaaggcacaaaagcaccgtcgtttaattgaatttcataagcgtaatattttaaactttctttttgttgcgtgtacttgatcacatttagtggttggcttttagcctcggttctccagcccaacaattctccaaacaccacaaacgaatcgcactccattaactgttttagcgataacgcgcaagtctgcaaatgcgcactaatgcggtgcacgttcataaattcgacatcgggtcggtaggtgttgcgcgatccaaaagtgacggcgttgtcgtgcacaattactctataattgcaaccgtccaatttttcttgcactaaaatttgtttgtcggcgagcgtgttgttttttttttttataatccaaatgcgaaacagacggataaatttgattaaaaatgttttcgtcttccggcatgacgggtccccgttcgttcaacgcgtacataatgatgctgtgcaacacgtcggcgcgttcgggcgggtcgggcacgtgcttcatacggtcgttgagttcttgcaaccaagttgtaaaaaacgtaccccattcttcacgatattctccgcgttgcatcaactcagcataaatttttaatttgtttgtatttttaaacgtgattgtgagttcgtcgtcaatcttgatgtcggccattttgtctgcaatgggcacgacgtgaacgtcgttaacaaccagttgacccaatgagtttgtaattaaatgcacagaatcgtttaagtttaatagcatgtttaaaatctttgtagattccggtaattttttgtaatcaagataatattcagagtacgtgcagttgaacatgagctgcaacaattttttggcgttagttaaaactgcaaactttaacatgcgcctcacaatttttaccatagacacaagagtcagcttcttcaagtaaagatacaattgcacgttttcgtgtccgtatttgtccttgcaatcggcgggcttcgtgaagatgcccaaatcgggcgatttgccagtaaacacgccgtgcagtccaacgtttaggtcaataatcacgacgtcattacccttttcatctttggtatgcttgttgaccaacttttgtttgttaaacacaaacttggcaaatgtttccttttcgcactttttgtaaatcttgtaatcggcgtcgctgtcgtcagcggcgtaacccttggcgcggctgcccgtatcaattttaatgtacaccattgcgatgcttttataacctgtgatcatgcttttaagcgcgcgctcttttataccatcagtattgcgcgtttttcaagacagacaatacaaaaacacgttctcattggtgagttaagagtgttcaacaaatccgcggcacgatgaacacggtttgccgttcagtcgattgctgcacgtgacgcacagcgtgtagtgaccgcagggcacggccaccatgcgtttctcttcgctcatgcaaattataaaatgctcaccacaaataaggcaatgaacacgtacacgtcattgtattttagtttgtttgttatttaaaacgttgttggcacaaacattaggaattaatggctgccaataattataaagttgtagacgtcgacacgtttgcgcgtcagctcatcacggacaaatgcagcgagttgatagaaagcgaaaacctgttacccgcaaacattttgcatattgtgaaacaggcgcgagacagctactttgcggacccatctcttaaaaattacgaatatgttaaaaaattgtttttgcgcaccaagtacatggacgactcgatcgattacaaaaactttaataggcgcgtgttgctgatcgtgtttaaatttgcgctcaacaaaggttccggctattttccgtcgtacaaagacctaatagaggtggccgtcaagcggctaaacaaaattaacccggacctaaaaagctcgcctcgcgccatgttgcaacattataacgaatgtctcgaaaatttggacaaccccgtcaccgacgagcaccacttggtcacgttcggcaaagaggtggccaccaaaatatttattgaagcgtttgagtttagctacgcgaccaccaacgagatacaattgacaacaacaaacaaacttgaaacggacgcgtttcaatccgtcaaaagcgtgccctcggcacccactttgcttacaaacgtgatgaacgaacgcaaacgcaagctgctaaacttggaagcggcaccacaacctaaaaaagcaaaattaattgcgtcatcacccgtaaaacatccgcttccagcgcaacgacctctattcgcaatctagcgtttcaagaacaaccgttcgtgtaaaactagtgtgctatttttaggtatgcgttatacatgaccttgctttacaagcacaatcaatcttgaaaaacgtgtcctgttataattcattatatttgaccttgttttacgagcacagtcgatatgaaaaaacgtgtccggttatgattcattaacgtgtcctgttatgactcatcgatggttttgtttttcaagtacgatcgtttttgtaaaacaagtgcgttgtttttaaaaccccagtcagtttacgcccaacagccgacttgaacgcacgtcgccatggccctctccaaggttaattttgtcaacggcccgctggaggtgtttaccgtagcggacgacaagcgggaaaactggatgatcgccaacccgttcgccgaggcgttgaattattcaagacccaacaaagcaatatgcgaaaaagtatctaaagaaaatgtaaaaactttagaagaattgcgatcgcaccgttgcggtgcgattacgtcatcgctgcatcctcaaacaaagttcattaacacagctggagtatttgagctcatcaacgcgtctgaaatgccggcggccaaaaagtttaagcagtggaatgccaacgatctcttgcctactttgtgcaaagaaggcgagtacaacatggcggtggacgcgcccgttgaaattgccgaaggcatgaacgccgtgcacgcggccgttaacaacggccaacaagcgccttgggtcaaggaccttgaattttacaaagacgagttggttaaacgcgacaatgcaattgaaaaaagggacatggctatagccgccaaaaacgatgaaaaccagcggctaacgacagcattgcaggccgccaatcttaacctggtagaagctaacaaaggattgctgaccgcgtttaatattattaacgaagcgcgtcgcgaaacggcgcagctggccaaccgcatggcggacattgcgcaggacgtgatcgccaaacccgccaatccccagctttgccacagtttggctgtgtgtgacttgggcaacgaccagtacgcattcgtgcgcccgcaaaagcgcagtttaaaacaaagcctaaacaggttgtctatcgacgagcgtgatatcgtgttccgcagcgactacgttcccaacgccatgaacgttttaaacaaggttaaagaatctataccccgcaacaactttaaggccaagcataacaaaattacgctattggaaaattacacaaaggaacaactgatggaagtaattaactctaccatgaccgaacgtcaaattgctaggcttaacatgcgtaataattaaaaataaaaattattatttatatttgtatttattccataatctttttatgcatctggtttagcgccacgccgtaattttttaataacgctttctcaaattgcacacgttcagtttctaccgcttgcgcgtttgtcattatgacgaccaacaacataaaaaacaacacaatcatcacgaccactaaaaacccgcacagcactaggacaaattctgtaatcagtgaccggttgcgcgtcacaaattgacttaactggtcgccgtccgtgggcgacgcgtggttgcggatagcttcgataatgggattgccggcgcggccaccgccgaggcgggccaccacgtgggacggcgtggccatgttcttacaaaaagtagttgtagtgcatggcatgcacggcgacgccgtgtgaaaacacgccctcaacggacacgcgatcggcgatttttttcaattccgttaggtcatcaaactctgagctgtcaaacgtgttgttaaacgggttattgtcgggcatgtttatcggcacgctgcctcgcaacgtgatagccacgctgtcgtttttgcagaaaacgcgcacgcgtccgttccttatcgcgtccgttgacgatttcaaattgagcgagttgagtttcacaataacaatgggcacgatttgatatggaaaaataagtttttgaaaaattttcacaaactcgacgatggtctggctgcattcggcaatgtgcagcaacgtttgggcgtctttgacatagttgagactggcgcggttcaccgtcgcgcaattggacggaatgtcgccgcgcagcaagcgccgtgtgcgttcccaattgagtttgttgtacaggctgtcgatctcttcgtgcggcagattgatcacgtagcaagcgggcaaacggcgatattgaaaaatgcaaaaaatacgctttaaactaagaatctttaccatcgtgggcgtttccaagttgaaacacagcaaaaatttatcactctccgtcagctctttaaagtgtgccagcggcagttcgcagttgatgggacgcagctcgttgtagttgagaggcaacgcgtgctcgcgcatgtccacaagctttctagatttcataattgacttgcaagccggctgcatttcgagtcctgggtacgtgaactcgatgggacacgtagggttttcgtggtgcactataagtgtgttgcagtaaaatagattattagtcaacaacacgctaaacacgcgcgtttcgcccgcgccaatctccgtgatgggcaccaacgggttccaatacacaatggtggcactgccagtttttttaggcgactggctattgccgctgtaatcgtgttcgtgtttgtacactagcaccgaacgaaaacgtggaaagtttcgtttttccacaaacagtctgtccgcttccgtgggcacgtacacgatcaaattctccgttggccggttgccgacatcgctttgcggttccactaaattgtagggaaacgcaaagaaacggtcgctcacgcaaactttaatctgaaacgggcattccatcttgtaagccttatgaattggttaattataataatttttgtaatattgttaattctgctcatatacacattgagtgttaaacaacaacaacaacataaaaaagaacaagagaataatgttttgcaaaggtgcgcagatttaggcggctttggcaacgtgattagcgattattgtgacaaattttacatgtgcgcaggtggtttagcaatcccgctttattgcaactcgggttttgcgtatgattatactacgggtcaatgtgcacacgccgacacagttgattgtcaaggcaggccctttttaagattatgaactttgacagtgttgagcaacgcggcgggaatgtaattgtactggtagaataaatcgcgctttacgcgcgagttgtttacaattataaacacgcaaaaatacattgcgtacaaaaacacaattataagaaaagtggctgataaaaagtacttcatggtcttattgtgtaaataaaagaaacaaatattataaaattatttagtttatttaaatctttttgcactgttttccttgttgtattccctgtcgttgcagaatttgcgttcgtgtgagccaggtgcgttttccctgcacatcagcttgcgaataaaagtaacgctttcgtaagttgtaggtgatatgttgccgttgtgcaacgtggtggaagcaagcggcttgcgtgcgttgttataaaaatgctgcaccgaatgcaagtccatggcgacacttgtaatgaaaaaacaatacgctacaccgcacttttatagtagtgacaataggcgcagtggatcccgttcaatagactatcgctcgacgattcgctgatgcccagttctgcggcgtccggcgagcacaaacagttgccgcacttgcgacaaaacaaatcgctatacttttcatagtttggcgcgtgcaacgcgttacaattctcacaaacgcgctggtactccatgaggcaatcttgcaaattttcaataggagttgcgtcaacgcgcaaacacaactgttgcattatgttggccttttgttctggaagcaaacttttgtcatcttgcaacatttccatgtaaaaattatttaaagatattaaatcgtcgttccaatcgttttcaagtttaaatcgggccaagagcgcgtccacgttggtcgtcgccattattaaaactgcctaaatattataaggttaaacatgcacgattacatgaacgggcacaggttgtttagagaagtagtcagcattaagcgggcacaatggaccatgatttggttagcgttggcgagcgtcacgatcgccgtcactttggcttgttacggcgccgtagtcgtcaacgagcaaatgaacacgatctcgcaatcggtggctgcacaaatccacagccaaacgcagcttcagcaccggatcgtgaacgagtttatggccggacgcgacgccgacttttattatccgctggtggtgcgtgccagcaacgtgatgattcacgttaacacgtttgcgcgccacacggccaatgcatccgacgtggaatatttttctgcgtgtcccgctagcgccagttacaaagattatttgacgcaattgtacaagttgaacaactcgcccgtcatcagcaacgtgtttttgttctcgggcaaacacggtctgggcaaaacatacggaagttttcaattgggcaaggcgctcagcaggtttgccgacacgatagtcatctccgtgccaatgaacacgttcggaaacatcaacgacgcgggcgcgctcattgaacggttggaaaacgcgttgagaggaaagtgttttatagtgtggacgttcgatgaactcgattcgtacttgttgcgcgacgacatgcgcgacaagactattacgcagtttgccgagtacacgggttttgtgaagagcgcaaaccgcgtgctcgtgttcacgatgaataacgccgaagtgttgctgcacaattattgggcggatcggacgcgcattgaaactgatttaacccattacgaacatgcagatgatctagccaaagccctcgagtttacgcgattgaacaaacgcacgtttttgcaagaaggccaactgagccgcttgtattcgtttgtgggcaataaactttttgtgtataaaccgtttacggcggacgttgcgagaaagtttgccgaccaataccttaaacgcgcaggcgtcgcgcacccagacgtgaatggtttatttaatgaaagtgtagaatattctgttagaactgtaaaaataattttagacgatacaatcaacaagtttaattaaaagcagtgtcaatggcgtctttgctgaaattggtcaacggttctttgcttaaatcgtaatttgttaataccgagtacactttttgcggtgtcaatcgacacacttgcgtttttaattcttgaaacattttctcgtgcacgttcatcattaaatatttgagtgaacatttgttggcgttggtcgcaaacatgagtataacaaaatctaacgcggccatcttgtaatcgtcttggtagcctttgtaactgcccacaatgcgaaacggtattttagacgttttcaaaaacttgcaagcgttgtaataagtttcaatactgttaagtattgcctctttggcacccgtgcgcattttattaacaaacaacacgttgcccaattttaattgtttagatttagcgtccaatttgtacaaattatacacgctcatggacgtgttttcgggcaacatggaattgtacatgcaatatggaacagcgtttagttccaaaaattgagcaaacaattcggtttgctggctaccgggattgttgaactgcaatttgttaaatattgtgtaacatacttccatgtcatcttttttggtttggaattgagcgttgttgtcaaccgttattaatttggggtccattttttctttaaaaacatattcgacttgtccaatgtgataaattacgcgcacgctgttatctaaagatgtatctttacttttcatcatttgtaaaacagcaattaaatatttgctaaacgcatcgacaaacacggtttgatattcatttgtactaaatattaaataccaaacgctatttctagccggcaatagagccgtgtaacatagcaagcatgctaacttgatgtgtgttatgtgagcgtcggcttcgtttttaatttgcggtataatactgtaattgaacaatttgtccatttcgcgatcgtatttgtcagaaataattttaccgttaggcaacaaagctatgagacgcgctttgagcgattgttttgattcgtcgttgtaaacaaaattaattttatctttattgtttaacaacaagtttatgctttttatgtcacaattaagcaaatacgggtccgcgttggtaactttactgagaatttgcaaaaagttttccaactctgcagccatgtgggttttatgtaaaaaactgggcgcgtcgttatcgtttacattgttgttaataaattgcatctcgttaataatcatgtgttgcaaaaacgtgtaaggcaatgtggaggccatgttaattactcttatttacaccacgtgcgaaaaatgaggcggtaatacaaaatacaaaatgtgttgctgatgcaattgcattactaaacttgaagacaaacaatgctttgccacaaacacgcacaaaagggtgccggtcaaatgcacattgtttagcactaccacctcagacctgctgggttcaaatacaacattgtttaaataatgtaaattgtcccaattagttacgctcaaacctacgtcgtcactcatttgcgtgttgctcaacacaccatcgcgagctatacaaaatccataattttcctcagtgttaataacaaatttgccttgtttaagcatgttaaaatcaaacacaagaacgcaatcgccattatacaatgtttttatgacgtcggttgtggcgtgcagtcgaaaatacacaccgtccacctcatcaaaccgtttataaaactcggtgtcggtcaacgacactgcggggtctgcggccagccgccggtttttgctaccttgaaacggcgtgacgtcaagctgttgcgtttcggacgccatcaaaagcatgttcgacgcgacaatttttgacaggttaatgcacgaagtttcatgcaccaaatgatacatgcttaaatgtatacgcgcctgtacaaacccgacatgcgttcggggatgcatacgggcacggtgcgcgccagcgccgtttgccgaaacagcatcttgtcgtagccgacggcgcaaatgcacgcgtcggccgaaaactgcgtcgtgtccaagtttaaacgcaacgcgccgtcgtcgcaaagataaggcctcgttgcgccagtatcgtccaccaggtccctgtacgtgctcacgcatgtttgtgcgacgacgaaatctccgccggccgcgtagatgcgcaacaggcccagcgccggatcgcaatcgatcaccgagtccggtgcgtgcgcgtcaattaaagcgttggtcgcgctgcagaaacccgcttcgcaattcaattgactcgccgcactggcaattacacaattatctctacactgttgatcggtcacgcacggcaaacggtttaacgcacaatccacacctcggtcgcgttgaaacaccaaatccataggaggcgcgtatgccgccatgtttgccgtgtcattgtgcataaactgttgcacaaactgaaacgtggaaacgtacacgatcaatacaatagccaacaaaattaataactgccatacggtcggcatacttagtttaaaattgcacctagtatgtcgtctgcggtaactccagaagccacacccatgaaaaaattgctttcgagcatagaaaatcaactcaaagtcaaagatgatcagctgcgaaaaaacaacgaattgttgaaaaggtacgtggtgctgctcgaagaaaaaaacaagcgaattgaagaattatacagcaatttgttggaggttaacgaacgcgcagtgcagtatcccgccaagagtcaccaaacgccgatgttgtgtgtggcgcgcgagtttaattgtttgcgcgccattactggacaaaaagtgcacgtaaataaaatgaaacgcgagttgacgagcgcggccgaggtggtcattgactcggtgcgccccaacccgcaggtggacttgaacaacattgttaattacgttgaaacagaatttaaggacaccatgcgtttacgcaacaaacgccacctggtatttgagactgaggatgacgccatcaaagtggcggccatgtgcaaatctttattggccaaaaagggcgggttggcgataaaacgcgtatataacgcatgcgctgaccggttctagtcagtcgtcatgtctgtaacagcgcacgtgttgtacgtgcccaacattccaaaatctcttgtaaacctacaaaaatacgtcgttgtcgatctatatcaatgctgcaacggagattatttggcacttttgctggtagaaaacaacattaccatcattgacttggaagtgctggaaaccgttcaagagtgcactctgaaggacattaaagatttgcgtgaaaaaatttgtgtcagaatagaattgtacaatgaatatttaaacaaagaataaagtgttaccgcttgaacatgcctaatgaaaagggcaaataaaacataccaagtattattaaaatgcaataaatacatttaatattatacattgttttatttatcgtaagcaaaatgtatttgctggctttaattctcattttgttgttaatagtgttggcttcggtcattgcgtacgttcgcttgattgacgtgcaccatgagactgtgcgttaccttataactttgtttgacacaagcgacgtgccgctaataaaaccacccggtgagattgtcattgagggcaacgcgcacgaatgccaccgcacattgacgccgtgcactacgcacgcagattgcaacgcgtgtcgtgaagggctagccaattgccagctgtttgacgaagacacggtagtgcagatgcacgatgcggacggtaacgagcaaaccgtcaccattcgagcgggtgaatcgtattgttttgcgttggaccgcgaacgcgcacgttcgtgcaatcccagtacgggcgtgtggctgcttgccgaaacggagacgggatttgcgctgctctgcagttgtttgcgacccggactagtgacgcaacttaacatgtacgaggattgcaacgtaccggtcggatgcgcgccgcacgggcgcatcgctgacgtggccggtggcgacttgcgctgcgtgtgcgacgaaggctacgtaagcgattttgacgccgctaccgaaacgccgttttgccgcccgcgcactgtgcgcgacgtgctgtttaacgagtcgttttttccgcgtgcgccgtgcgccgacgggcaagtgcgcctggatcatcctggccttaacgactattatcgacgttattttcgaatagaagatatttgcgtcgtggacccgtgctcggtggatccaatcagcgggcgtcgcacgtcgggacgtttgattagccacacgaccgcggacggtgaagaaataaacggttgcaattgcccagcgggcgacggattgttgcccgtgtttaatcggcacaccgccgacacgggcatggtgcgtcgcggtgaccgtaccgttgccaatgcatgtttgcaaccgtttaacgtgcatatgctcgcgttaagacatgtcgattataaatttttctggggacgcgccgaccacaacaatatttcagacgcggacatggtgtttcaagccaccgccgcccaacttagcgacgaacgctaccgcgttatgctgtatccgttgctgacgtctcatccagacgtgacggaaatcacgttggcgggcactggtgtgttaaaaatatccgtatcttacgacactgtacttaaaagcacgctgttgcccgcgtcgttgtttaggctgtttaaatggaaagagggcggcacctcgagacctgtatgcttttttcctggcgaaggccgttgcattgtggccaactcggacgcgtgcattcgccgacacgccggcgcgcaagtgtggactgccgaaacgtttcacccaactcgtggtgcgtgcttacgccgcgacggggccaacataaaaatatggagccgcgccgaccgctacccgcgcggcgacgcgcccgccgcgttgcgtttgcgcgggtttttcctgaacaatgaccgcgaacgcaacacggtgcgcgtcgtgtccacgggcgctatgactagcggcgcgcaaattgacgcgttaacgcaaacgcttgaaacctatcccaactactcagtatagtgaataaaattaaacgcgttttttgcggacgaccgtttccgaaaagcacaatcggcgctgacgcacctttgacacattgccaaaaatagaacgcatctttcgcggacggccgtacacaaaaagcgggttcggcgttgacgcaccgccaaaaatagaaagcgttttacgagtatatacgtatttgaaagccccgatcggcgctgacgcattgttataaatagaatctgttttacaagtatagctttactcgtaaaacgcatttattaagccaatttgattatgagcgtggctcaagtagtggaggcgtgcaatttgtatgcaatttttgaacaacaaggctatttgtttcgcgcccgcgtgtgcatgaacattgcgctcgacaatctactcaaattgcgccaacaagtaggctcgatgacgcaagtggtggccatgatagacaagagtgaaacaaaatgcttgcggctgatgaaaaaaataaacacaaaaatcaagcaaagaactttaataaaattatacagatttaaataaattttcaaactcttgcagaataattgcgttgttgttgtgttgatatctaaagattttgttgtagttttcaaaatcaacaaaatgcaactgcccggtgctgtcgtcgtacagcatgtcgcgcagcatgctctcagccggtttgtccacaaacatgtcgttggcgtacagcttttctatccaacagcgaatttgcaataaaatgcactgcttggcgcttgcgctcaaagacgcaacgcgctccaggctcagcggtttgccgggcagaaacttgaacacgttgccgcgcaaataagtttgcaggttgggcacgtacaccgggcgcggcgcactcaaaaacatgtcggggcacatggtagtggcggcgtgacgctcgcgcaggtggcacgtgtaatacttggaccaagccgcagacgccattaatttgattacagcgttgtgtgctttggaataaagcaccacatgtttatacaggtttttcacgtcgtgggcgtcgtacaaactcacgtagtccgtaaacaccatttcgcgcttgctttccgtgacgatgggcactttgttttgcaccaaataggcaatggcttgcctcgccatgctgtggctcatgcacttggcataaagccttttgtaattgtagcacaccgggcctcgaacagccaggcgctcgctgcgacgggtcagttgcttgttttgcttcatgtttttttgttgaaagccgctacacaactgatttacaggaacgcgcaccgcgtttatatacccgtttgcaatctaatctagttgttatctaattaaattgttatctaatttttttatctaatcgtacaaatacgcgcggcattgttgcaattttcgttccgcgtcattgtaggcaaaacgggcgcgcggcgtgggtgcgcccgccaagtggccagcgtgcacgtcgggcgctgcgagcgggtccagcagcgcctttcgcgcaaaggccgcagacagaacaaaaacaagcaaccaaaacaacttcatggcgaacacagtccgtttggtaacttgtttattcggccgcgccttttatagccggcgcgcggccacagataagatacgcgcgagtataaaggttgcctggcgcgttttgcagctcagtgttttcggtattgcgcccaatataagacgcgacaatgaacctgttcaaacgttgttcgcaatatacaagaattcccagtacaattaaaacacaattttctgttgacgtcatgtcgtacgtcaccgtcacgcttgtgcgccggtttggcgccgtcgcgacgggctttttatcaacgggcaggacctttttcgagctgcaatttttgcaatactggataattacgtcgctatttgtcggtgggttgactaacctaacgctgttttgcaccgacgcagaaccgaggcgcacgaacttgtcttttgagctgaagatgctgcacgccatgtattttggcaacgcgctggtacatcacgcactgttgcgcacctcgcaaagcgccgtaagcaacatgttagtcaacaatttgttacattgctgcgcgttgggactgcttttagcggagctgatcgtgctgctgggccacacactgggctcctattcagactaccgctacgccaaaatgtgttttgtgattatattctttgtgtttggcgccctaagtgcagggttgctaggcgcggacaatatggcgaccgcaccgctatgcaatgacctgcttatggtttcgtttttgattaccgcatacatgctgacggctattgtgtgggctgcgcgcaaagaagccgctggttcagttttaaagaacgtgcaattaatgccgtttaacgaccctccgccgccctttgccttcgtagaaatggaggattttgtcaaaacaaaagtttaaaattattgtttgtaatgtattaatatattaaataaaacaaatgtatttaaataaaaatgttttttattcccccataggagtgaggtttgatagtttacaattgttgccgtccccccaaataacaaactcggcggcgtgtttttgaaccaatcgcatcatcatggcacagtcgtcctcggcccggtgaccctcaacgttgccgcccacgtgccgcttgtacaaatctatcagcttgtatgattgttttgggcgcgcgccccgttgccacgggcacagtttaacggtgacggtgcctgatttgctgcgcttcatggtgggcgggccgctgccatcaaggatggcaaacagcgcgtggtacgcgtcggaacaatgcacggcgcccgcaaacccgttgtcttttaaatgtttgtacaaaatgggaaaatcaaaagcaaacccgttgtaggccaccaggcacaccggcgggctaagcagcgctaaaaaagactcgatcaaagcaaccgtccgcttgtcaaattgcggctggccgcgcaagttttccgcgtttaactgcgtcagcgcgctcgcttgttccgacacgtccacggtgggttcaaaacatagggttagtttgttgcaaacgcgcgccgcgccaagcaactcctttctggtcacgcattgcaggctgagctccgtaatttgggtttggttgttctgcaacttgggtagcccggtcgtttccagatccaaaaatgcgtaggtgttgacggtagccatggcgagcactaattgtttggccgcgcgagcgctttatatcaatctgtacacgaggtcgccgcgcgtgtacgccgtaatgttgttttcgtcaaacaaaacgttgataattgcgtccggctgtccgtcaaactcgtacaccgacgcatcggtaaccaaagcagcttcgctaatccacgcatcatcggcgacgcgcacgcatgttggacaacggccgcggccgcgcgcctcttcgtgcgccagcagcgcacgcaccaaccgccaccaactccagcggtgcgcaagcacgcggtccgacgcggcgcgcggcgcgttcagcatgctttgtgccgcggcgcgcggcacgtgcttattgaaaaactgttgagcaccaagcggggtttcgaagcggcacagctcgcccacgtacgggcgcgccgggtcgtcagctttgatttcccaatgcgtcgcaaaagcgtcatccaccgttgggtcgtgtttaaagtaatacacaaaccgatccgggcgccgcaacgcacgggcgcgcgtcgcggcattcacgcccacaatctccacatgcagttcaaacggtaaatatgacaaaattctatcaaccatttcaacaggcaaatgcggaagggtcgggagaatttggtaacacaatttacaacgcttgcttggcggctccatattaacgtctaatgttaaaaagcttgtgcttaaatattaaacaaccttgttacaacaacgcccgtgatcaaaaacctgacgcatgtctaaaaacagcacacgtttttcgaggacggccgtgcccgaaagacgaggtcggagctaacgcaccgctaaaaatagaacacgtttttcgagaatactcgtgcctgaaagacgaggttggcgctgacgcatttattaattaaaagtaattttacatttttatacacttaaagttcgtcttttattttaaagtttttattcataacatttaacaagtcgccgttgtcggcgtcgatctcccaagcaaataacccacccaagccattttgatccacgtaactagtttttgccaatacagaatcaacactatcaaacgatatcaagtcgccattgtctttgttaaaaacgtaagatgctttagcggccgtgtcaaatttgtatttgtacttgtttaattcgtttttaatttggcgataatcgacaacgccgtcttcccaagtaccggtcacgggcccggcagctgtgcctgtgaaatagttgtcaccgtcatagcctgccacgcctgtccaaccgcggccgtacatggcaacgcccacaataattttgcgcgggtctacgccctggttcgtgagcgatttaacagcgtaatccgtgttgtacagctcgtttgggttccaactcggcgcgtagagtgtagtttgatagcccagatcgatgtttgaccacgcgcctttgaaatcgtagctcatgagaaatattttatcgaggaacttttgcgcaagatcgtattttactacagcaattttgtcgtgacccgaactaattgcacttgttaattcgtatgttttgcccgtttgcagttgcaactcgtccagcattgcgcgcaattctttcagtaaaatgttgtacgtgtcagcgtcgcgttctttgttgccgagtgttgggttggcgcctttaccacccggaaactcccaatcgatgtctaccccgtcaaaaaatttccaaacctgcaaaaattctttgacagaatccacaaacacacgccgttttatcgcgtcgtgcatataatagaacgggtcggacaatgtccagccgccgatggacggcaaaattttaaggtgtggattggccaatttggccgccattagctgaccaaagttgcctttgtagggctcgttccaagcagatacacctttctgcggtttttgtattgcggcccaaggatcgtggatagcaactttaaaatctgaacggccctggcaagaacgttgcaacgcttcaaaactaccgggtatggttttgagggcgtcgttaaggccatcgccgccacaaatgggtatgaacccgtacaacaaatgtgagaggttgggcagcggcactttgtccaccggaaagttgcgaccatacacgccccattctacaaaatacgcagcaattgttttgtcttggcgccggccaggtttgttattctcccgccaaacatattccagcggattcaaatgaccaccgtcagtgtccgcaactttaacagtgacaggctcgcttaccgagcagccatcctcatcgcacaccttgacgtgcatcctaaactgtccgcttttggacacgacaaccgtggcttttttagcgtcagcgtcgcctttccagacctgtttatcattaaacagcacataagccatatcaccgacgccaccattccacacgttccaagaaacttgtacgttgacatggttttcgcgctgtatcaaattttcgtaagcagtggcgtccgaattgattttgacgagcgcataattgcgatcggcccagtcaatgaccggtgtgccaggcgacgcgtacgcgaccgcaatagtcaaccacaaaacttttaccaaatagtgcaccattttatttgtacttataagttttaattatttaatgtaacaccatgaacaaaattgtgttgtatttgttaatttatgtcggcacgtttagcgcggcatacgacctattgaaagcgccaagttattttgaggattttttgcacaatttcaataaaaactatagcagcaaatctgagaaattacaccgttttaaaatatttcagcacaatttagaggagataattaacaaaaatttaaacgacacttcggcccaatatgaaattaacaagttttcagatttatcaaaggatgaaactatctccaagtacaccggcttgtcgttgccccttcaaaaccaaaatttttgcgaggtagtagttttaaaccgcccgcccgataaagggcctctagagtttgactggcgccgcttaaacaaagtgactagtgtcaaaaatcaaggcacgtgcggtgcgtgttgggcgttcgctacccttggcagtttagaaagccagttcgcaatcaaacacgatcagctcataaatttgtcagagcaacagctcatcgactgcgattttgtggacatgggctgtgacgggggtttgctgcacacggcgtacgaggccgtcatgaacatgggcggcatacaagccgaaaatgattatccgtacgaagcaaacaacggcgattgtcgcctaaatgcagccaaatttgtagttaaagtaaaaaaatgctacaggtatgtcttgatgtttgaggaaaaacttaaagacttgctgcgcattgtgggcccacttcctgtcgccatagacgcatcggacattgtaaattataaacgtggcgttatacgatactgtgcaaaccacgggttaaaccacgcagtgcttttagtgggctacgccgtcgaaaacggagtaccgttttggatattaaaaaacacttggggtacggactggggagaacagggttattttagagtgcaacaaaacataaacgcttgcggcatacaaaatgaattaccttcaagcgcggaaatctattaaaacaacaattgtgtgtgtgtgtgtgttatttattttacaataacaatttagtaaaatacataaaataaacgatcaatagttgcggctgcggttgcgtaccatgcaaaccaaaaacacaattatgcctactgtcaaaaagaaggtgaatccgtgacctaacatgaatgaatagagcgtggcgttaagttcgcccttggccatctcagctatgtcgctgaggctggtggtctgtccgccaaacttggtatactccatggtggaaatgagattgcttttttgttgggcgataaacgaccaaccgctggcgtccttccagctctcgtggaagcttgtgttgccgatagtgggaatccaaaactcaatgtcgtcgtcaatggccagctctttgtaattgttaaagtcaatgcactgcgccgaatccgtgttggacacccagcggccttctttgtagatgctgttgttgtagcagttgctggtgtgcggcggcgggttggtgcacggcataagcaaaaacgtatcgtcggacagaaacgtggacgacaccgagttgttcatgaggttgccgataagtcgctcgtccactttggccaccgacacaacaaggtcgtgaaacatgttattaagcttgttaatatgcgcgtgcagcagctcaaggttcatgcgcagcatgtcgttctcgtacatgagctcttcctggatgtgcatcaagtcgccctttgtggccgtggcgccttcgtcgtgcttggccggctcgttgtgacgccatgtgcgggggcgctctttcaccacgctttccggtttgcgcctgatgcagcggttaaatttgcaataccacatgtttttgctcaggtcaaaaatgtcgttgtcgatcaagcagtgctcgcgcgtgaccgaatttgggtccgatttgtcgtctttaatttgcaagcacgccactttttcagaccttcgcgtggactttgatttctccttgagaatcatgctaacaccgtcgcggtgcaacacttctttttcagttacgttgatgacgcccccgtttatgtccaaaatgtgcaccgtacactgatcggtctcgttgtcgcactcaagccgcgtgtacatcttggcagtcgacacgccgcagcgccacgacttgttgcacgtgtgatgcgcaaaatggttgttattttgccgctttattaattccttaccaggcacccacacgccgcggcccacgttgtcgcggaagcactcgtcactgtcgctaccccatcggtcaatcagttcttcgcctacttcgcactcttgacgagcactccacgtgagcaaatctttctgatccacgttaactgtttctagtttttcctcgacgcgcgtgttagagtccagcgcgccgccgttgtacgcgtacgcttgaaagtagcctttgtaaccgatgattacgttttcttccaggtcggtttcttcaatgtcaatgctgacgtcctttttcagcgattctttaggaggcgtgataggcaggctcttgatccgccacggacccgttttcatttgcgcgttgcaatgctcagcacccgtcgatagctgggcccaggccaccaaaactaataaagcaattttcaccatcttgtaatgtcttgtagcacagcacaattgtaactgatttaccagcacagcgcaggcctttatatacccatgtttatcagcgcgtacaaccgcctacgtgactagccaatcttatcttatcacaaccgcctacgtgactttgtgcaatcttatcttatcttatcacaaccgcctacgtgactttgtgaacgtgcgcccaattaagccaatcgttatcttatttggtagatacaaaatcgggtataaatacttgaacgtgttggcaaacttacacagtttgtatcttgcagtcgttcgctaaggaacttggtaaatatattttataaataaataattttattatgacgtaattgataattaaagatgagtcatttgattaaatatatgagtcattaaattaaactaactttacgcgatcaattgtccacgaaaagcaagtttataagaccgaaacatgaacggtgattctgaaccattaaacagtcgcgtttttaattacgctcccgacaatagtttagaggtgattataataactaacgcgcccaacgatcacgacggttatctagaattaagcggcgccacacggctgctggcaccgtttttgcaaaaaagtgccgcgactttgtggacaaacgcgttgtcgtctcacaaattaattaaaaacaacaaaaattatttacatgtgtttggtttgttcaggtacttgcaaaactacaacctctacacaaaatcgcacccgcccgagtattacaccgtcaaagtcataatttgcgacctgctgttgggcgtgcaaactaaaacgtttgacccgctgtgcgaaatcaaaacgcagctgtgtgccattcaagaaagtttaaacgaagcaatcgtcattatcaataaccacgcttcggcagaacctccgcgtgctccagacacggaggcgtgcgagttggccgaatcgttgcattctgagtacagtaaaaaattaacgtttgcgaccgacaccattttggaccacgttaagagtatcaaggacttggtgtgtttaaacaaataaaaataaggttaaaatgaatttttgggctaccttgagcgtgtgtttggtggggtacatggtgtactcgggccacttaaacggagagttgcaagaggtcaaatctattttgattgtggcgtacgaagctgcagagaaacattacaacggcgtaatagatgaaattgaatcactcaaaacagacacgttcatgatgctgtccaatttgcaaaacaacaccatccgcacgtgggacgcggtcgccaagaacgggcaaaaaatagcaaacctcgatgaaaaaattaaagggttgttgtccaggcacgcgatgccccacggcgccaatgtctgataaggtaattatcaaaaaattacgctgtacctacaatatagttcaatatgacgtcatcttgtatgacgtccaacaacaacgtcatgtttgacgacgcgtcggtcatgtggatcgatgccgactatatttttcaaaactctaaaatgccgttgtccacgtttcaacagctgttgttttctataccgtcgatacaccgcaagatgataaacgatatcggcaacccgccggcttgttcgtttccaccttccaataacaacggtcaatacatggtggacatttacggcgccgcggtgttgacgatgcgtagcccgtcgttgttctccgaccagttgctcaccacgtttattgccaacaattacatgagcttttgcaaccgacaacggccgtgcccgccaccaccgcagccgcaaacgccgccgtttgattgcgcccaaaaacaaatcgtgaacgcgttggaaaaactggcgcaccaaaatgacctgctcatcaacagcgtcaaccaaatttcgctaaatcaatccaaccaattcttggagttgcgcacgcagtacgcgcagattgtggccgcgttggaaaacgccaaagacacaatacttaaccgtctcaacgtgttagtggatgagattaaagccgcgttgcctgaccagtccgctcagctgcaggaacaaattgacaaattgcttgaagccatcaacgtggttgcgcaaacgctgcgcagcgaaatgaacaacaccaactctattttgaccaacttggcgtccagcataaccaacattaacagtacgttaaacaatttgttgactgccatcgaaggcataacaagcgacgaaggcggcggcgggttgggtgacgccgaccgtcaaaagctgagcgacgtgcttgatctggtgaccgaaataagaaacattttgatgggaagtcgcaaataaacatggcacccatcagaacaaaatctgaggaaacgtcgcaaaaaagcgagcgatctaaacaatttaaagcaagttacagcaagtttacaaaaaagaaaaacgaggcgcctgaacgtgcgcgcctcgccacttttattgaaattaatgtaaaccaaccggaagacgaagtgaacaaacttgaattgcgcgctcaagaaatgttagaaaatagaaaaccgtctatattcaacaaagacagcgtgcgcgcttttttaaacaaaaacacgtttgtggtggcgtttgcgcaccccacctacccgatggattacattagaaatgcaacaagcataacaataaattgttctaaaataaatcgaaaattgcttttttttgacaaaaataaaaaaatgatgaacgtgttgcccgaccgcacggcgtttaaagtgcaaatcaacgacaacacaccgatgaacgtgcaatcggcaatgtttgatgaaaaattggaattagaaattgattttttatctatatcaataaaagaattgatacccatacaaaaatgtgtaatttatttaaatattcttttacaaagaaacttgcaatgggtggtgccgcaagagttgataaacacctttgctaaattacaactcgcggcgcccaatcagttgttgcaaaactcgtaacgacaatgcacgtagcccagcttaccgcggaacaacgcgccgtgtacgccaagtacaaatttgtcacgtatgcgcgatcggtcgcgttgacgcgcgcgcagcttgatcaatggcgtgaaaaaaaagttatagaaccatcgcccgtgtctagagaagaaactttgcgcgtggaacacgcgacgcggggccaaaacaaaaacgagttgtggtacgcgttgcgcgccgatcgcagcaccgcatcccggtcgtcgggcggcggcggcgtcggtatgcgcgcgcccgccctcgcgtttggcaacgcgcaagaagacgatgtaaaaacaaccaacgcagaattgtttttggaattgcgacaactcgccgaaaaacgcgtcggatgtcaggttatcgacactgtgctaaattgcggcatgtttttgagcgcgttggggctacattcggcctctcccgatgcttattttgccatggccgacggttcgtgggtacccgtcgagattaaatgcccgttcaattatcgcgacacgaccgtggaccagatgcgattggaattgggcaaagcaaaccgcaagtaccgcgtcaaacacacggcgctaattgttaacaaagcgggcccgcccgagtttgaagtggtcaagactcacgatcattatcgccagatgcagcggcaaatgtacgtgatcggcggcgcgcccgtgtgcttttacgtggtgcgcttcaagcacaacctggtggcggtgacggtgccacgcgaccaagagttttgccgcaaagaagctgccgccgagggagccgcgtttgtggcttttgcgctagaaaattccaatcgcgaacagtttaaacgcgcagacaaacgacgcgcatcgtttgcaaacatcgatcacgcttacaacgcgacgcaggttaacgcgctagtaacgcgtaacttgtatttggcgtatggacagctaaagtgcgcttattgtgacagttttgaaatggatagcggggcaacgcttgacgcggttcttacaaggccgcacgaacgctgcaattctgcaggtttgcagattcacaagtttgacaatcccgcctttatggattttgccaaccgacacaccagtttaattaacgctggtcatcgcgataacgcgcgtgggttggctacagcaggactttacgccactgtcgacggattgaaaaccttttgctgcggcgttcgaggtagcgctacttcgcaggctcatattcctatgtgttcgtattatttgacagtaattaataaagggtcataaaacaaaatataatatttatttaaataaacatttttatacaatgctaataaattgtttagacacaaatttaattttaatttcggcgagaaccggcccctccttgcctttaacgtcgacgtacttgtttttgttgagcgcgtttgtttcatacccgaccaccttgcagctgtcggtaaacgattcgcaaccgtcggtttgtaccctgctcccgtcgccaccgtcacactgcagcctgacaccgtcgggctcgtcaaaaccgcggcctatgcgcggcccatcggtcacccaacgcggcgtttcgtcgacccactttttaatcacgatgctaagctctggaacttgattggcgagcttgagtagttgctgctcgtcgtgctgcaccaactgctttatggcattaaaatcgccaagcctaaactgcttggtttggcgggtggcgctgtcgtaaaacccgtcaaacgtgggattgtattcaattagacgaattgttttctcgccaaagctaaacgcgttaagcgttcgctggccggttcttacatacactttcaacacatggtcgctgcccatttgtttgttgtaggtcagctccattttaacaacgccgtttgaccggtcgcatatcatttgaacataatcttgctcttcgccgtcgtagtacacggtgactgcgggcgttttcattttggtgtgtttattgtgtggggaacggtaatagactaactaaattactcggcgcgtttcttttatagcaacgcgccggcaaagataataactgactcatttttaaaatgtatttattataaaaattaacaatgtttaaaccctctttaacccaacccgtttctctgcgtccgcgattaacttgtcagcccgctcgttgtcgttgtcttgtgtctccatcttgatacgctcgcgtctgttgacgcttttgttagcaagcgtcaaaaactgttgaaccgacatgttggctgttttttcggcgtaagctgcgtgcaccgctgcaacgttgcgcctaatgttttgtggaatttatataccgctgtaccccgcaaatctcccgcataaacacacgtgatggataacaaaatgtacgtacgcatggagattaaatttgacgaggacacgggacgtttgcaaattggcgatcgtgacgtgtttgtgcgcgtgtttgagcccggtcaagaagtgtttgatgattcgctgaaccagtaccatcaatttcccggcgtggctacagacgtggtgtttccgcagctggcaacgggcgcgacggtgagcgtgcacaccgcggccggcgcgtacacggggtcactaaccgccagctgtttcaactaccacgtgtgcaacaaacgcttcgtgttcggcgtcttgcaggcgttggaggtgcccgccgatgtgcgcccgcacctgcgtcttggcgcgcccatcctgtgcgacgaccagttggtgtccgtggtgacggccgtgcacaaacgcgccgacggcgtttggcttgtgcccgtgacgggcgtgcgcggagcccatcaagtatcgggtcatgcgcgcgtgcgcaacggtgtgcgcgcagagcgcttgtgcgccgggcgatcggtgtacggcacggtccaattaccatacgacgaactaaaagcgtacgcgctttcgcaatcgacgccgcccgccgacgcgcaagagtcgtgcgcgctgttttacaatgattcagaggtgcgcattactttcaacaaaggcgactttgaacaaatgcattggcgactgccgggaccctttgtgggtcgtttagtttaattaagcattattaacaaattattaatatatttatttaaatcatttcaatatcgtcatgtctaagcccagcatcttgacgcaaattttggaggccgtaagggccgttgacagcaaggtcaccgctttgcaagcacaggttgaccagttggtagaagactccaaaacacttgaagcgctcaccgaccaactcggcgaacttgacaataaagttagcgatattcaatcaatgttgagtctcgatgatttgcccgaaccaccaacacccgaacctgaaccggaacctgaggtcctggaaattcctagcacccggcgaagccgcaagtaaagttaaaacagcaaatcaataattttgaaatattcgtaaggttccttgattaaatagtacaacgcgatcattagaaatatcgcaaagtatacaaaaaatgtaagctcttgatgcaatataaaggccgcagcggccgcccctgtgtttaacaaaaataaacccgctaccaccctatttaatttgttattattttcattcatttccaataacgtgttttgcctaaatgtgtactgcataaattcgaggcgcgtgtacagcgagctgctggcaagcgcttgacccaccaaagtggtttcatcaaaatcttcaattacatcgctttcatccaactgcaacatttgaccatctgagttaacttcgagcgccgccacgtaatcgagcaggtggaacagcgactgaaacgttgcgtcgtcgtccatttccacaatgtctgaaaagaattcgggtaaaaactctatgatttcgcgcgacgtgttggcgtccaacgtttcaaaataggcggtgaggaacgtgcgagacaggtcgtcgggaaactcgcgcggaaacatgttgttgtagccaaacgggtcccatagtgccaaaactaaatccgctaatgttaaaagaatcaacacgatgcccactacggaagcggctttgatggcgatgcgagtcaaagctttggccgccgtggtgagcgttttgatggcgatcctgttcattgaatgcaccacggccgctttgtacgtttcgcccagcaaacgtaccgtgacgcgctgcgacgtgctcatcaacatgcgtttaagcgacggaattaacgcggtattgatttttttcaacatggttttaaacgcggtcattagcatgtcaaaacctatgtcggtggcaatgccgaacacgagcgaatactcttccaaaaactgggctataattgattcaagttcttcgtcgctaatcgacctatctaacgtgcgcgcagtgatgattgaacgcggcgttccgcgtgcttcgtaagtgatgggagttttggtaaatccaacttcggccgtgtacgttaactgcatcagcgtcccgttctccaccattcccaaatcttgtaacgtaggcgttttgctaaataatttttcaaagtcgtaattgattgcgcgatcgcgcacggcgcgccattgtgcaagtacggcgttggagtcggccgttggacgcggcggcaggatgggcgacggcgccgtgtaatcaaaatcgcgcaactcggtaaaaatgttattagcaagcattttgaacgtgacgtaaagcgtgtcacccaacacgaacccaatcaaagattcccaccagcgaaaagagcagccgccgttcataagctctcgcccaaagcggcggcagtaggcgtcgttgaactcgcctttgaaccgttcgggaaacagcgggtccgggtcgggacgcacgttaaacgcgggcacgtcgtccacgcccatgatagtgtgctcttcggtgcgcaagtatgggctattgaaatacatttttgaagtggaatccaccattacgcactggttgttgggtgtgtatgtaaattcggctgattgcacctcgttttcaaagccttcgcgcatcgctgcggctcggtccaagtgatagcacgcgggctgcgcgtacccgacgctagtttccgaagtttgcgtgtacataaacggcgtctggttggacaccacgcccgtttcgtgaaacgggtaacagctcatgctgtcgcatccccgacggctaaatgccaacttgactgctagcgcgcgatctctaagcatcggcggcacataataatcgtcgtcgtttgaagcgggtcgcaacgtgtaatcaattagaatatgtggcaagcgcgtgcgccaacgttcaataaactcaagcctgtgcatgtgagtcgcgtaacgacttgcgttcgtaaggtcgacggcggtcaatactgccatgtttgattgcttaaaatataaaaaaaacaacatatttgaaatataaaaattattaaaagctgcaaggcccatttgatcgccgctttttagtcaacttgtttttcaataacgatcaaacttgtaaaacgtgtgtgctatttttagcgatgcgtcagcgccgaccccgtttttcaagtataaacgtccgcgtaaaattagtttcatattaaacaagcgttgtaggaggggcacattaaaaagacgcgttacaacgggtatataaacacgtgtaatgctgtattcacagttatcaaatggttagtgtgacgcataatttaatcttggttttcgagtacgatcgttcgtgtaaagcgagtgtgctatttttagacatgcgtcagcgttgaccttgtttgtgtaaaacgtgagtcattttttagacttgcttttcaagtttgtacgttcgcgtaaaactagtgtactatttatatcagagtggtgcgcgtgcgtgaaataatcaagacagggcaataaagcaaaacatttttagttgccagcctgcaacaagtctagcttgtcgtttagccgccatgaccgcctccacgtttaggaaaactacatcaaggaccagctgatggaggttattaactctattatgactgagcgtcagattgcgcgtttaaacaattcacgcaacatgtaaataaaaaaatttatttaaaaatttgtttttattaataaaacctttgaccaatttatttataatatgtggctataatacaaaaaatatacaatagtacaaaatatacatatggttgtgagacaaaacataattaattttcttgttcttcttgcaaacgctcgcggcatatttttttgtgaatctttatgtcgtaatatctgatcagttcgccgagcgccgcgtgcgtctgcaccgcttccggatgaaaatacaattcgtcgtacttgccgttaaacacgtatcggttagtgaacccgcaccggctgcagttaattacggggttagaataaaacatttttgctttcttgcacgccgtgcaatagccggacttggcgggtcgcacggggaacgtgatcactcctgtcacaaactcttgaatgctataaccgtagatttccacaaacagcgttccgttaatgcgatcaaaccgattgtcggcaatcgcttccataaggttgctggggtcgttgataacaaagcaattgacgtcattagcagacgtgggggtcttaaacacgttgcggtaacgattgagctgcacgttatgattgatttctttgagcactaaatctcctgtggttctaagcgcaataaacatgatagtctcgttgggattcttgtattctagcaacaattgttgcaaaactttaaaaggtcctttgtgttgtttaatttcaatatcagtgtgtgtaaaatactgaacttcaaattctaacggaaaaatgtattggtagaagaaacccgcttcaaacagccgtttaatgtgcaccgaattgatcttggggtagatttcgtacgtgttagccggatcgttgtgttcttcgctgcaatcactgcaagcaaactcaaaactgccaggtttgttgggcggcttgcgcacgtcgtcgtcgtcagatgtcataggcggctggcgcacgatcacaaacaaaaaccacgggcgcttgttttctttaaatttgtaaccgcaaattgtgcaaacagactcttgcacgtgctctaaatcatgtttagttttaaactgcgtcgtttggttgaacgtaagcatgtccttgctgttaatgtatcccgtgacatagttggtggcaaagcgaagcgtggccttcatggccgcgcgttcgttttcgcttaaaaaatgcacacgcaaatcgcgcactacatcagactccaaattgtcataagtagtttcaaacctgtgtccaaattcgggcggcacgtgaccggcggcactgtcgtttaacttgctgttaacgcgcccgatgcgtttaaggcatgccacgtgcgcttgttcagttttgttaagttgcgttttggtgggaggtcgacgaacacatggcgacgctggcgccgcgaccttggcgagcagcggacgagctgcgggcgattgcgccgcggttgaacgctgaggagcgttaaaaatgttattttccctgaaccagttcataattcactcaacactatactgtgcatgttaacgattgggacgagcttatatacccaatgtttatctaaccacttatctacatccgcatgctcatgcgcctcgagtcacgtaggcgttttgcacacggtactataacgtcacaaccgcctggctatataaagcgcaaatcgcgttctggaaaaacagtttgcaattagcatcgggctcgtcaacatgtaataagtgttctatgcgactgtgcgacgcaacatgataaaaggcagctactggcctaacgtactggatcgcagcgattcgtgcgaagcaaacaaggtaatggattttaattttgtttttgctcacatgtactgcgacgatatactagtggacgccaaggtgcaacgcaacgtgcgcgccgcggcgttttccctgcttgacgacaagcattttgagctgtttaaacgtcgtatagataacaaatttttttgctattatgatcgatgtgatgatgtaacctttcccaaacatttgcttggcaacgacgcgtgttgccaccattttatcaacgatgccatgcgcgttgtggaatgtgtcaagagtgtggaagcggttagcgcgggggtgaacgttattgtgcttctaccatatctaaaacaattgcaaacggcgttaaaaatgttgggtgacgcgtttaagtgttgcgccaaaaccataaacgggttgctattgtatgtcaatgatctgctctcgcattgtttggtgtgcgcggacaaaatacaggcggccactcgcaccctacaggtcatgaacttgtttttagacacagacatgctgtacgaatgcgatttgtgcaaagaagtgtccaccgatcagcggtttctcaagcccaaagagtgttgccaatacgctatttgcaacgcgtgctgcgtcacgttgtggaagacggccagcacgcacgccaaatgtccggcttgcaacacttcattcaagtcgtcataataagtgtgttgcattatgagcggcaacaatctaattgcgctgtcttcggaccagttcaaatacttgtttctgggcagttattttgatttaaaagattttacccatgtgccggcagaagcgaaggcgtttattgtcaactatttagactgcaactttcgcgttcttgacgatgcaacgctgcaaaactacaccggctacctaaaaagcatacacctgcagcatttgataggcggtttgcttacgcccgacgtgtacaagtttatcaaaccgcaatttcattttgtgtgcgagcgcaccgccgtggacattttagagtttgattcgcgcatgtacataaagcccggcacgcacgtgtacgctaccaatttttttacttcgaacccgcgcaaaatgacctcttttatttatagcgagtttataaaagtgtacaaaaatagattgtttgccaacactaacaatcatggctgcgtgttggcaggcgcggcaggctttgtgtttgaggacgcgtacgtggattggagcggtgtgcgcatgtgcgctgccccgcgacttgacaacggccgtcacccgtttcgcttgtacctgttgggtgaagagatggccgcgcactttgtcaataataatattttaccgccgcatcccaccaacgcgacgcgtgtcaacaacagcatgtttatgttaaaaaacttttacaaaggattgcagctgtacagattgcaataccaagtggtaaacagtatgaaatttattactcgcaagccaaataaggtttttgacgagattgacaaagaactcaacagccattcgccctttgtgaagcttatccaacgcgactacatatacgacgcacaatttcccgccgatttgcttgaggtgctcaacgaatacatgacaaagagttcaatcatgaagtttatcaccaagtttgccatagaggagcacgcgaacgctaacgacatgctgcgcgaaattgtgtttgatcgctattcggttgattgttatcgcaaactgtacataaaaatggaattgaccaacgtgtttcccgccatgtatgacaacgaatcggcatatttgtttattaacaaagacttgatgcagctaaccggtacgctgaacgcgttttacgcgcccaaactgcgtatcctgagcattctatcggtgaatcggttatttggcgcaacggaaacgctagattaccatcctaacctgttggtgtaccggcaaagtgcgccgccggtgcggctgacgggcgacgtgtacgctgttgataagagcaaaaaaatatttttggtaaaacacacgttttccaacacggtgcctgcgtatcttttaataagaggtgattacgaaagtacgtccgagctaaaatctctgcgcgacctcaacccttgggtgcagaacacgcttctcgagctgcttatcgtcgacgggcccaccaccgtcgccgcagaaactaaacacaagcggttaacatgatttacaccgatcccgccaccggggcaaccaccagcacggacgcgtccggcaacagctatttaaacaggttaacgccaaacacgtttttgatcattttggcagttgtggtggtcattgctttaattattatattcatgcaatccagcagcaacggcaacaacagcagctcacccgccaccaacccgcaaatgggtttcgtaaacccgttaaatgcgacgatgcgtgccaacccgtttgtggccgcgccgcagcgattgtaatataagcaattaaaatgagacgcgtgcggtgcaacaaggtgcgcaccgtgaccgaaatagtgcacaatgacgccaaactacccagaacctatgatttagccgagtttgatttaaaaaatctttcaagtttggaaagttttgaaacgaccaaaatcaagttggtgctcagcaagtacatggccatgataaacaccttggaaatgacccagcccctgctggaagtgtttcgcaacagggccgacacgcgtcagattgtggcggttatactggccaccatggggtttgtgcacaatcgcttcaatccgctagtgacccattttaacaacaagatggaatttgtaatgacagaaacggccgaaactagcattccgggtgaacccatactgtttacagaaaatgatggcgtgctcatgtgcgccgtagaccgaccgtccatcgtcaaaatgttgagccgcgaatttgacgtgaacgcgaccgtggacatgaaagcgcctgatcacggactgcgcattgccaaaactttagctgcgtccaaacgaaaaaggcgcaccagcgacgatgatgactatgagtttatccagcgacccaaaacttttgatgaatacaataaatgtatggacgcgttgtccgactttaacattaccgaaacggaagccacgcaatacttaacgctgttgttaattgtggaacacgcatatctgcactattatatatacaaaaattacggcgtggttgagtattctaaatctttgctgaccatttcgctgtttgtaaacaagttgcgctcctctatgagcaccaaagcatttaatttactgttaagcaaattccgattcggcatagaagaatttgacaaaattagcggctcagttggttctaagtttgcagtgtataattttaacaaataaacacataaaatgattttattagttttgtttttggttcttttaaaagtgctcatttttaagcggctcaatgaaatgcacgtggactcgcaccacagcaaaatctgtccgcaaggctactttggcctaaacgcggacccgtatgattgcagcgcgtattacatgtgtccgcacagattgcgcatgttctgtgaccctaatcacgagtttgatctcgactcggcgacttgcgtgcccatcgtgtacaacccttgcggtaatggctgcactgcgcgcatgtatcgtaatttattattgtaaaaaataaaacaacatttataataattatttttatttatttaaatattacttgattgttgcgttccgtcaaattgtacagagttattgttgatgcgcatatcaggacaaaatagtttcaccacgtttatgtcgttgtggtgcgcacggcagcgttgcaaattgtttaaaaatccagcaggaatgttgcccgataaggatataaagtctttagggtaaaattgatcgggtcccgagttgctatgcacgcgcaatccgctgacgtgtcgagtgcgtttagcctcggtagagcgacgcacgctgagcacgtgccacacttccggaacaaaatttccagaacgcaccaccacaaaccccaatggcgccgtgtacttgttgtaaacaaaaagttctcgaaacaggcacggcgcgcgcacacagcttagcacgtacgcatcccgccgcgcagcgcccatggcaacctgcatgctaatgggccgtttattctcgtatccgctcaccaaacgtgttttatcggcgacggccggagcggcgcccattttgaataaataaacgataacgccgttggtagtgtggggcatgtagaacgtaatgttgttatcttgttcgccatcgggttggtataaatagacgttcatgttggtttttgtttcagttgcaagttggcagccacacgcgcaagcaacgcttaccgacaatgtcgaaacgaattgacaatttccgccggtcttatgtgacaccgtctacgccaagtcgcgcgctattcaacgcgaccgaagtgcctattgacgtgatggtgaactcgccggcggaggaaaccaactgggaaagtatgagtttgactgagtttgatccgcccattggtacagaagatttagaaaacatgttgcaaaccccgtccgacaacctaacaactttagaaaacgcatcgcaagtgttggccaatgacgtcggttcgagtcttctttcagaatacttgtcatttaatcctcgcgccatggagcccgaggtgcagctgtccgaaccgagcacgtctggcacaaagcgcaaagcttctgaagacatttgtgtagacagcgatgatgatttttcgtccaggggtaagaagcacgtaaacaagaacaaaattcgcccgcgatacaagaaagcaacagtgcaaaatcacacaacgttgcaagaagaacaacgctataccaccgagatatgcaccgttgcgcccgccgaacagattgcgcaatatttttctcaagatttttccgtgtatttggacaaattggattgtcaaatgagtgctaaccggttttcagaccacatttctgaaacaggttattacgtgtttgtggtgaagaaatctgaggtcaagccgtttgaagtggtgtttgccaagtttgtgaacaatgtgaccaacgaataccaaaacaattattacatggtagataatcgcgtgtttgtggtctcgttaaataatgtaaagttcatggtgtcatacaagttggtacgcgaccacggcatagagattccgccacacgttaacctgtgtgatgacacacaagcggcgagcaagccatacgactgttactttgagccggttaagaacgcgtttcaagcgacgctaattaaatattttcacctggacatgtattatgcgcaaacaacttttgttacgcttatgcaatctttaggggaaaacaagacgggcatgctgttgggtaaactttatcaaatgtaccaagatcgctcgctatttacgttgcccataatgttgagtcgcaaagagcccatcgtggaaaacaccccgctaagcaggaattacacgtcgtcgtacgtgtcgcagattattaaatattcaaaaaatattcaatttcctcacggtgaacccaatcaagacattatcgacaggctggagcagattgtgacgctaaaatctccattgacatataaatacagtagcgtggccaacttgctttttaacaaatacaatcaccaacgtgataacaatgctgataatttaaaaaaggttaaaaaagaagacggcaacaggttgctggtggaacagtacatgtcgcagaacgagagcgatgtcacaagtcacaattttattgtgctgtcgtttggaagtaacgacgaacgcttgaccatagccaagaaaggcaacgagtattactggattgcaggcgagattaaagacattaatgtggatgatatgattaaaaaatacaccaaaaatgttcaccatgtgtttaaaattataaaagtgaaccggcgcgaaagcaccacgtggcacaataatttgctcaaaatgctggctctgcttttgcagaatctaattaatattgaagatgccaagcagctatcggagaagagtgacagtaaatttagctataaaaaaatatgaacaatgattttagctttaacaattatacattttttactttattcctttttttatttaagtcctattttgcgccggtgggggcggttgcataactataatgggtgtgccggcggcacttgttgcgctaccgccaccgcttcctccttttaataataaacctgtatattagataaatgattaggcccaaaaatagcactgcacctataagccatatcaacggcattaatttattactgacgctgtcgctcgagtttgaggatttgccaatgaggccgtcttcgcccaacaagtgatctagacccaggtcaccaatcaagtcacccaaattgtagggttcgatgcacatgatagtctgtccggggagcaaatcgctaatgtccacaaattgcggcgtgtccgggtcggcggccgggtcactttgacgacacacagtctgctccacttgataattaaaaccggtgcatatgctttgtagttgtgccgtgtcgttgatgagcgggtcccgctcgcagatggacacatctgaagtgttcaagttagggtcttgttggcacgtgcggcctagcagcagacaagcgtcagccgtctcgccgcccgacgaaccgcgtacgtaatagctgccgcccgtgttgttgagagcgcgaataatgtcttgcacaagcgtggccgcgctaaaagtcaaataagcccctccggccaatagcacgcccacgcccgccgccttagcgccctgcaaatagctgttaagacgcgggttttgctgcagcgcgcggtctactccgtcggccgagcgcacattggtttcgggaaaattttgtttaactgcgtcgccgcgcgtctttttcacgtgcaagcctgcatcgggcacgttatcggcgcgtcgcaattgcgtaagcgagttgatttgcggatcgttaatgccctgaaacacgccgcggatgcgtggcacatcgttactgcgcgtgatgcggttgatgtcgcccgcgctcacaaactgattgttggataggttgtagcccggctcgtaacggccgttgccaaggttacgcgtgctgggcgtgcttagcacgttagtgaacccggcgggtgtagtggttagcaatcgcgtattatcggccgcaaaagtagcagggttgggatacactttgtttaccctgcgcaggttagtaaagaagctcatgtttacggcttactcttgtgtttcgcgatcgtacaatctcgaaaaacacgcacatcttacatagcaaattatttattaaggccgtggggcaagtataaaaggcgttgcgcggttgcaagtttacagtcaaacatgatcaacggaccagtcaacatgaatcaaaacgcggtaaatcacacggtttccatggaacacgggccgccggtcgaggtcgcggcgcgcagccttggtgaggtcgttgactgggcaaatgcgcaatggagctgcgccggtgtgcacgttttcctacgtgacggcacgctcgtggacgacgaagattattttgcctgtttgccgcccggcacgtcgtttgtggcgtcgttgagcgaccgttttccggtacccaaaataattacagcgctgcagcaaaatccttcaagcataagcgcgttaaaccaagagcagttaaacttgatatgtgaatactactttggaaggcacatggacgctgcgccaaccgcgcccgacgaacttttaataaaaatgcaaaattgtacaatttaattaatgagggtttaaataaataatgtgtcgtttaattgtttattgtttatatttacacatgcgtttatccacatagtatagtatattagaattgggaaaataggacatggtgtccattcgtgcaacacctccaaataaatgcaataatcgtttaacaagtttgtttccggccttgtcgtgaaacgtgcacttgtacactacgggaaactatgccacaagagtttgcagtagctgcagcatttcgggcattttgcctaaatgcagcattcggcgagtgggttctaggccaatactgctgttgttgaaaacgtgcagcgcttcgttattaaaactagccgtgtctagcgctacaaaaacgcgacaagtgttttttgaaacaaacacttcgaccggtctatttgtaatgccttttacaaaaatccgttcggtttctataatgtaaaaaaaaactgtgagcgcgcggcttacacgccgcgcatttataacaaacaaaataaacaagtgtgatggcgtgttaagaaataacaagtacacaaataggtaaaaaatatatatttatttacatatttacaaaatataattattacaatgaacttttaaatttttccatcaaaatgttgtgctgttgcgcaaacatttccattttaagtttagtttcggcgatctgcgcgttcagctgactctgcaagtttttagtagcaccgttaaacgtgttgttttcttcctgcaatttgagcacattttgggattcgcgtttgagttcgaaatcttttaaccgtaattgttcttttaacgtctggttgtcagattccctcgactctaattgctgttttaacgtttggttactagtcgtgatcatctggtgatcagttgtgatgctattcaagtcatcctgtaatttgagccgtttttcgtactcgcgatgtaattctaaatctttaaattccaactgctgtttaagcatttgattgtcgctcttgatcatattaacgtcatgctgcgcgcgcgtcgtttcagcgcgcagttgtacaagttctgcttgaagtttttgtatagtgttgagttcaatatttttgtcgggcatgttatctttacgtaaaaagccccaatgtttcttaatagcctctttgtcactttgtgcattaacggctttaagttcttgaattcctttttcggtatacatgcgacagcgatcagtttcttttttgcaaatgctgcatgtgtaggaattttttacaaaaattattttaaggtaacatttaatacacacggtatgatcacattctgtgctagtcacaaaagaagatgttcggttttctaagtccgtaaacgtacacgaacaaatgttacacattaaggttacttctatttctggcaatacttcttgagtttcaacatcactgtcataaaccggttcatattcatcatcactgtctatgataaagggctccaaagaacgaactggagaataatctggcgaccgataaggttgaatttcttcgtcttgtatattttcatgaaggcgtaatgcgcgttgatgtgcttgatcgccgggttgcgatgaacgcggcgccggtgatggggcgctgcgctgcgttggaaatcgggcgggatgccgcaccggcgatcggttgcggcgtggcgcaggcaacggagccgggcggcgcggcgccggatctgaacggcgcaaaggcacagtttcgtcttcgggtgaataactcaagcggcgggccgcgccgctcgaacgtcttgacaatgcaccgccgctgacacgatggcgcggtgtggaagagttggcgttgatctggcgactcattgtagatgaggttcagtgaagctctcgtgttgaactgtgcttaccagatcgcagcgggctgtatttataggcgttattaggctccatataaaaagataaacgtgatatcgcattacaagtacaaccgtacttgtatagcaaggtcaatttgtttacgcgcgcatgtatcaagtgacgtatacatgtgataggctaatatgaacattattgcagtgcaaaaaagttcacttttatatcgcaccctatatacacatacgaactctacgtttcgtagactatttaacttgaatagtctacactgttgtatacgctcccaatacactaccacacatcgaacttttttgcactgcaataaagttcactcttaacatgtttgcgtacatgaccggtttatcttattgactgatatggtgtgaccggcatatgatttatctaatcaatcaatatggttcaaacacgtaactggcgtacgtgactaacggtgactggtatacatgacctgattaggctgatacgaagcgttatcgcgcttcaatgcccctataaatacaggctgcaacgatcttgaaagcatagttcattagcaacagccgcagtgaacacattaagcaacaagtttaccagtcagccagcttcagccagccacccctagccagccagcttcagccagccacccctagccagccagcttcagccagccagccagctccagccagtcacagtcagccacaatcagctccaggcagtttagacacagtaagcatgcgtccagttaaactttcgcttaaccgcaagattgttaagtctaaactttgtttaaaaaacaaacgcgcacatgacgctaaacatcaatataaatttggtattatccagccgggcaatggcaagtacagtaacctgttaaatctatcagacattttgtggggccatatttttaaacactcttcaatgtatgacatttacatgtttaaatccgtgtttaatgttaatgttttattgccgcccgttatggcgctagttaaagacccacatagttttgatatgtgtgataaacgttttgattatcgtgtcacaaccatagtaaatccttgcatatattcttttaaagataaaaattttatagatctgtataacgaacacgttaatttgaccgtgtgtgacattaaaagtaaattaggcctgtttaataaggaattttcaaaccctatgtatgattatattacatttatttctttaaataatatgataaaaacgggcacaaattcttgtgaaataaaaagttattctattgatgtacctgaaaattattcagtggtcgaatacacgtacttgtgtattaatgacgtgttgtacggtactagacctttgctaaacaaatttaattttaccacaccattgccttttaattgtataattaaacaatatttgttaattaaatctgatatggttgaagcgtgtgtgttagataacaatatgcctgttaacggttgttgtgaatattataacgctaatcctaacgagtatttgtgtatggataaaaaattaactaaagattttgtatactatcatgaccaagtttattattaataaatgtttagaaatatttattcattttatttaaatcgcctaaccatcagcgctgacttgctttacgagtttatttgtacttgtaaagccaggtcaatgctgactcatatttaaaaataaaactcgcattacaagtttatctgtacttgtaaaaccgggttaatgctgactcatacctaaaaataaaatttgctttacgggtttatttatacttgtaaaacgttttgtttcaggcgggagagggacgaggctacagtagctataaatacaagcggttcaatcttgaaagcacagttcggtttgactcggtgctgttaactaggctttaccatgtcttatcgatacactccgtatgaaagccagcgcaatcgccagcaattgcagaagactttgctagaatcgtttcggctaaaccccgttacggcgtttggggctacttgcaacatatgtttagaaacctacatgatgcaatcaaataacgttaccgagtttctgatgccgcttaacagcagttgcactcacatgttttgttacaagtgcattattagcatgtacagcaacgtggacactactcgaagcaacgtaaactgtcccatgtgcaggcagaacattacttcgtggcaaacgttttttcccaacacgtcggtaagttgcaaatttaccaaaaaagctgctggcaacgtgccggccactcagcagttcacggacgctttgaaagttcttcaaagcagatgcgcgcccatgcctgatgaccttgaatcacctaatactgaagcgcgccaaatgctgcgcgaacaactgaacaagttgaatcaagaaaacaaaactttgcaagaaacattgaatagaaacaagactcagcacgacattgcttgggagtcatcttgcgctcaaatatcatcgttgcaaaagcgcataagcgagttggaagcaaaccccgaagttaattcattaaataaaaatcgcgagttggaagaaaagaatcgtgagttggaagaaaagaaccgcgaggtgaaaaacaaaaattgcgagctgcaaaattggaaccgcgaactgacaaacaggaataacgagctagaagaaaatgcgcaattgacagaagccgtcaacaaaataaacagaattcacgatttagaaaacaaaaattctattcttgtgttgcaatcacaattaatggaagttgaaagtcaaaatcgtgagttgcaagacaaacagcaagcttacgaattgattgttcacgaaatgaagcagcagcttgaagagcgtggtgtatcggtagatatttaaaagcttacgaattgattgttcacgaaatgaagcagcagcttgaagagcgtggtgtatcggtagatatttaattttcttgtttatttaagtatgagtaataaacaggctattcttttaacggattacgatgcgtgttttattttacaccccaccacttcaccaccagacaaaacaaagcctgacaatgacgattcagacttttgcttaaacattaaaagtcaaacacgacttgtgcttaattcgccgccaccggcaaatgaaagtgatgacacggccgatttacagcagaccacgtgcgtcattaaaatataaaatttgttaaaattaatttattaaaaaactgtgttttacaatgttaacatacttgatgagtctactattaatgtcatatttagttaaagaatacacaaaatcacgagcattataatcccgcacgtccttcaacacggcgatatcattgtattgctggcggcgtttcatgcttgacaggtttagctcttcatccacaaatttttcaaacggatgcttgccgccggttaatagtttgtaggttagcacgcccacggcgtaccaatcaaacgaacgcgcgtaattgtgacgccgaattttttcggggctaaaatattccaacgtgccgtcgtgcacgcccttagagtgttcgcgtttacacagcccgtaatcgcaaaggtaaacgcgatcgcgcgccctaaaatataagacgttctccggctttacgtcgttgtgaacgtatcctgtggcgttgtgcaggtcatttagcgcgttgcacaattgtctcactatattggccactaacgcgctttcgagcgctccttcattttgtattgtttcaaacaaatcgggtgtttgcacgtaatccatcacaattacccatgcgtttggggttccataattaaaatacatgtccacaaaattgggatgatctgccattaaatcgtgcacgttaacttcatcggcgctaaaattgtgcgcgttgatcgtcttgcgcaaatagcgtttgctggtggggtggtggtgcaacacatcgattttaccaaaccggccattgatcacttgaggcgccgcgacgacggtgcactcgtcggtgaaccgtactagtgcttttaaagttgcgtccattatggatcgccaatatcaatcggtaaagtcttacttgaataacaacaacgcacacaacgcgatagatgccgacgcgttttttcaactagttgcaggacccgaggcgcacaatttaaaacgcggcctgttcggtcgaacggtaaagctaaacagggcaacgcttttggatctgcttaaacttgccgaaaacatatacgcggacacggcgtacatgcaagttaacacaatagaatcatcgcgccattttgccacgttaatgcgcatgcgtaacttgttgttaaacgtgcaagacgaacactttcgaaacgtgctggcgagcattgtggcgcgcattgaaaatcttttgcgttctgacgcggtcaatgacgttgaaatcacagttttaagcggagatttttacgaagaatattccagatacgcaacgcgtcaatacgtttcgaccgacacgttgccgccgccgccacctttaactcctcctatacctgaaacaacgcaagcgtttgtggcgccttcacctccacccgctcaagcgtttgtagcgccttcacctccacccgctcaagcgtttgtagcgccttcacctccacccgctcaagcgtttacagcgccttcacctcagcccacgtttgtagcgccgccttcacctcagcccacgtttgtagcgccttcacctcaagccacgcaaacaccttcaccccgtcaaacgtttgcggcgccttcacctgttcctgcagaatcgccgcaacccacgcgtgcgtttccgactccagaaggtacgttgtctcgcggcgcggctgacgagtttgaatattttgctggaactagcgttaatggcgtaaatctaaatacgacgttgaaacctcccgtacctccaaaaccggcacatttatctagacctaattttatgtttgtaggtgataaagtcactggcaatactccgcctccacctaatggtacatcgccgcaacctggtgtaaacgtgccgccgccacctgtagcgccaccacttaatgttatgccaccgcctccgccgccaaacgtgccgccgccaccgccgcttgacaatttgttgttagacgcgatgatgtcagagccgcgcaaaggcgctaccgatcgcagcgcgttgtttgaccagattaaaatgggagccacactcaaaaaagcgcaacccgtggaaccgccttcggaccttcgcggtgacatgttaaaccaaattagaacgggcgcaaccctcagaaaaacgggcaggctcgaagacgaaaatttgggcaagcctaaaaaaggtcgcgaaggaatattgggagtgttgtacaacacgctgggcagccgccgcggcggcatagattcggagcggtcggacgttgccaccagcgaatcaaccagcggatttgacgaaagcgcggacacgcgcgccgacaaagccagcaaaagcgagctcaaacacgcggcacacttgtacaactttgccaaagacagcaagctgtacaacatacaaaaagtaaacaacagtgaattgacaaaaatattggaaaacgttggtcctttattaaaaagaagccctagaacggctgaaaacgtggaaaaggccaatgccggtttgtacttgtttagacaacacgtgacgttgcctaagaacgcgttggacgcgcagcccgcgcctgaattgtacgccgcggacgcgccgcagttttacgtacaaattgaagaccttctttttgccggcaggtacgacgacgcgcgcgcttttatacaagcggttgacgcgcccgaagacatgaaactaaaaaagtttttaacggttgcaaaccagc

SEQ ID NO: 7 - DNA, 132239 bp, Anticarsia gemmatalis nucleopolyhedrovirus
ttaatacgcggggccggtaaacagaggtgcgtcgggcgcaaactctttcaccttgaacacgagcgagacttcaataagaatttcttcttcttcgcccgaatcagtgccaatgtacacaatgggtttgtaaaagttttcccagattacgcggttgacaaaggactcaaacgagttggtatactcgctgtggatgttcatgattgggcaaccaccgcctttcttggctaggctaattctgtactcgttgttcatgcccacgtaggaaggctccacaatgcggattacctcgtggggcacgtaatcgcagtcccaacggagagcgtgttgcgccaggaatttgtagcaacggttagggcgagttgggcggaggttaatgactaaaaacacatccatcacttcttggtcgtttacaatgggaaagctgtcttcaacaaaacgagtccaagtttcgcgcagaaactctttaccgctccagttaacaatgagcttcatcgtgtcgggttttacattgcggatttctttaaaaagtgtcaatttttggtttttgccgggccctaaaaatgggtcttcggccacgatgtaatgatctagcccatctaggcttttttcttcctcctgatgttcaagaaggtgcttcttgcgcttggcgttcttaatcacagaacccaagtttttgtaatacttgttatcatacacatacgtgcgaccaatggtcggcctatacgtataatctggcatagttatagcaaattttactacaaagttgctacaataacagcaaaatacttattatctatttaaaatgtaaataaaaatacaaaattatatttaaaaagcatttttattatttaacaaacaatcctgcttgagctgcaacttgtaaatgcggtctacaatttctttattgcgatcaatgtcttcaaggtgctgctgactaagcgtagaccagtgcccgtcatcgtcgcaatgaggcgcggctttagcttgcatcgccatacggtctgctgccaattcaacccgtttcaatgccgctttttcagcgcgctcttcggactgttttttctttttacacgacgcttcaatctgcttgttcatgtgcgcgcccacaaatcgctccaaatcgtacaaacactccaaatcggcttggttttccaagctcgcgcccgtttggaactccatcggtaaaacaatcgcaaaatcctgttgatggaatcggccatgttgtgcaagcgtcgtgtgcttaatattaaaaattacaaatggggtttttgcccttgcacgtgcccgctttcggacacagtttattgaccgccttcatttttacgcaattagacggcttgtacacgtcctccgccttgatcaacaaatgcatcacttcacccacgcacttggggtccatcttgtaaaaatgcaaaagcgcgtcgattaagcacgcgctcttgcattttgtgcacgacaccacgttgcccaaatagcaagtaaactcaaagcgttttcggtacattccgccgcgcggcgccgacgcgttgctcaattcggtcattattttaaccatgcacagcggcatgcgcaacgagcttaatgccttggccaagtttatcgacccgtcggcgcatgcttttaaacaaacgttgcgtttactgcgatgcaaaacggcacgtttaggctcggccggcttcgtcgcggtgagcaacgcgcgcaatctcagccccgacatttccacaaacaatccttgtttaaacacggtgcacggagacaacgccaacacgcccacaaagtcgtcggggtcaattaggtacttttcactgtttttcaaactgccaacgccagcggcagggttccacactgttgtggaagccatgtttacaccttgtcacacatcaaagcagactggcctgccgttgccgccgaacttttaataatcacgggcggtttagagataacgtcgcttgacaacaacgacgacgattctaaaatccggttacaatcaaacccggttgttgaccgcgtgcacagctcgtgcacgctgcggcgcagactatttaactcgcgccttatctgctcacggtcgtagtcgtgattggaaacgatcacgggcgcgttggttgtcctcatcattgggcggttcatatttatatattattgagtaaagttgcattaaacaaatataacttaatatggcgagcgcgcgtttcatcaagtttagtttgcgacttacgcaaggattcaaggaaaacattgttgcagacattatccatttggcgcgattgcgcgcgttaatagacggaaaagtgacgcacacggacgtgcatcgttttggattcctcgaccgcaacgcgcttgtggaagcgtgcatggccgtaaacgtgcaagtgtacgtgcccgacggcacaattcgcctcgatcccaaaactatttattttagagtttgccaaaattgttacacgttggccgacgtgcccgcgcccgacgaccactccatcgcgcgctacttatgcgccgcgtgcggaatggtgctggtcatcgaccacccgctggacgtgttaggtgacacggaagaaggagtcaacgagctgctggaagtgcagcgcataaacgcgggtggcgacctttagtttttgcacaatcgtttttattcgcaaacattacatcggacaattaacacgcgtcgccatggctcaagttaaaattggacaatttaaatttggcgaagacacgttcacgctgcggtacgtgctagataaagatattgtaaagtttgtggccaaagacattgctagcagtttgggttacgaaaaattttcaaacgcggtaaagaaatatgttgatattaaatataaatcaacgtacggcgatcaaagttttaaaaacaatgtaaaacggggcgatcttttgtatttgcaacctcacactatattgctttcaaatataggcgtgctacagctgatttcacgctccaaaatgcccaacgccgcagaattccaggattggttttacgaccacgtgttgccggcgtgcctgcgcaaccgctcgcccgtagacttgatgcgcgacgcagagtattacgtgcgcctcaacgccgagccaatgctggggcacgtgtacgtggccacgacgcccgcgtacgccgagaaaaacttgttcaaagtcggccagaccgttgacctgcatgcgcggctgagttcgctgaactgcgggcgcgccgatttcgaccagatgcgctacgtgctgtggacggacgtcgtggctgggcacgtggccgccgaagcggtggtaaagcgccggttggcgccgtacaaaaactgtaacgaagtgtttcaatgtgattttgaacacgttcgacgcgttgttgaagaatccataaaacagcaatcgtcatttgtaaacattatttcaagcaattaacacgcgtcgccatggctcaagttaaaattggacaatttaaatttggcgaggacgtgtttacgttgcgttacgtgttagatcgagatattgtaaagtttgtagccaaagacattgccaacagtttaaaacatacaaatgcggccgaagcggttcgcaaacacgtcgatattaaatacaaaacaacatatgagcagggtgagaccgtatctcaccctgcttctaccagccttgtaaagaggggcgacccactgtacctgcaaccacacacagtgctaataactaagtctggcgtgattcagctgattatgaagagcaaactgccttacgctgtggaattacaagagtggttgctcgaagaagttattccgcaagtgctttgtactggcaagtacaatcccgcaatcaagcagcacgaagaggcactcaggcaacaacaagaggaaaacaaacagttggtgactaagctgattgccacgttttccgagcacagcaacgcaatgcggcaggagcttgtgaaaaaacaagattttattgagcgcgtcgttgcaatgaaagacaagcaaattgaagccaaagaccaacaagtgacgcgggtcatgacagatttaaaccgtatgtacaatggatttcaagacactatgcaaaaaaaagacgaacaagttactaaattggtggcccaggtgattgacttgtcgggccgcgcggtgcaatatccggaagacgagcgcaaacaccccgtgttgtgcgtgacgcgcgacggtaccacgttcacggccatcgccgggcaaaaagcttacgtgcacaatcaaaaattgaaacgtaacctcagcgcggccgacattgtggcggaaacaacacgacccaaccccacggttgactggaacaacgccacgcaccggctggcggccaagaagagcaaacgttccattagttttgaatctgaacaggacgcgcaacagtttgagattaaaataaaacaattgttaaataatgttaattaatatttattaataataataaaacatatttttaatttacttgtatctttaatttattgtctacaaatctataaatacacctactggacaggaaacgcacaaaatgatcgcttaaagcaacgtttcgtttgttgtttacaaagcgcagcgcttcttcgtacgacatttgccactttttcatgtagtagtataccgctaatgttgccgatctggaaactcttgcgtggcagtgaatcaaaatttttttgccttcatttattcttcgttctatgtaatcgtacaaagcgtctatcgcgtttattaatgccatgcacgtaggcttgttttcgcaataaacatgaatgtgataaccggcgggcaaaccaagtgcctgcctgatgggacccacgtccgagtcaatcaacgagatgacgctttcaatatcgtgctttgtaataaactgtagcatggcttcgttgtctccatagtatccgcttacaaacaagttctcgtctatttgattagcgtcgtacatgatggcgtttcaacaaatcctccaaatagttgcgtctttcaattttgtgtccgcgcgctgcttcaaaacgtgcaattgcgtcggccggtgacacgtgcagtttatctataatatatcgacacactaaatagccggtgcggtttaggccgtgcgtgcaatgcacgccgattaacatgcccggacactgagcgctaaattcttgtacggtatcaaaaaattcctgtacgatgtcttcgtttggcacttcttgacccggaactctaatctttttgtaaagtacacccgcgtcgcgcacctccgcgccgttgtagtagcgtaacgtgtttgttaaatcaatcacggcacccaacgcgcgttgtttatttaccaaattataaaccgtccaacgatcctcgtcgttggtcacgtactcaaacacttcttgttctaatggcactttaaaacaaatgaggttagtaccttcgataactttaccgcacgtggtgtaattgtgccagcgtctaggaaacattgcacgcgtgttttacgttcgcgtcgacgttcgcgcgtttcaacttgtaaccgtacactgtttttcagtttgcaatttactctttatatatgcccgcgttatctatccccactctaaattgatattgtttttcaagtataatcgttggtgtaaatcaagtttaacaaatttgcgtttcaagaggggcgtactggaggtatatatacgttagcttgcaacgctgtatttacaattaacaacgcctcagtaacagcaacatgtctctgtgctctcaacttcttgtgtacgcttactacggcgaatataatatgccgcacaaacgttacggcgaatcataccacttgtacaggatcgtaaacgaatatcttatcaactcgtacgtaaacgagacgtcgtgcgtgcgccgcgacattgaaacggcgcgtcgactcaacagcggcgagctttcttttgatgacgcgcgccgacaattggacttggaagaaatcgccaagcgtttaactacgtggtatcacactggagaaatgaaaagtttttgctcagaaatacaaagcgttcttgccgaaataaattgccacgcgccgctcgaaatgcgcgcgcaaaccggtgcaagcatttttgcgctaaactcgctcgagtttcctccgaacatgaccgacagcttgcaaatgcttataggccggtttatgcattttgtgcgcggttacgctttaacgcacgtggccaatgtctttgaccccacagtcaaattaaacggatggtggtataacaagttttgcgtgcttacgtacatgtaccgaataatatgcggcaccgtgcccgcagagctgtttacgcgtttgcaaaacgttgtcactaaatacatcaaaccagaatatgacgagagcaataacgcgctcgcaataggaaacgtatatggccgtttttgcggcattggcaaagaccattttgctcaacacaaaatgaggtgcgtttacattcttttccagtacatgcgaggcgaagtgacgtacgcaaacgaacgatttccatgtttcagcgtaatcaaagattttgggaggcaatgcaaagaaacctacagggatatacaattgcaagttgatatacttcattcacacgccatgacagataaacaaaaaaatgcgctatttgacttgttgtgttgcaataacgcatcaaacattgacgtggattcttacgattatattgtaaaaaaattttataatgttgttgtttattaaataaaataaagttaaatgtttatattttttatttttaattattacgcatgttaagcctagcaatctgacgctccgtcattgtagagttgatcacctccatcagctggtccttggtgtagttttccagcagcgtaattttgttgtgcttagccttaaagttgttacggggtatggattctttgactttgttcaggacgttcatagaattgggcacgtaatcgctgctgaagatgacgtcgctcgagcccaagcggcgcagactgcgctccaaagatcgtttttgagggcgcacaaaggcaaactggtcgttgcctaaatcacaaactgccaaactatggcaaagctggggattgctaggtttggctatgacgtcctgcgcgatgtcggccatgcggttggccagttgcgccaaatcttttcttgcgttttcactgtcttttctggcgttttcgctgtctttgcgcgcttcgttcactatattaaaagctgtcattaaatttttgtttgcttctattaggtttacattagcgctttgcagcattgtggacaaagtttcaatttttttatctttttttacaatggttttcttgtaaaattccaaatctgccatccaaggagcttgctggccgttagttacggccgcgtgtacggcgttcatgccctcggctatctccgcgggcgcgtccaccgccatgttgtattcaccctccttgcacaacgtgggcagcaaatcgttggcgttccactgcttaaactttttggccgccggcatctccgacgcgttgatgagctcaaacactcccgccgtgttgataaacttggtcttggcttgcacttctttaggcaacgttgacgtaatttgggtcgtaccgattcggtacgaccgcaattcttcgtatgttttttgattgcagcttgacaccttttccaaaatagctttatttggcttgctataattcaacgcctcggcgaacgggttggcgaccatccagttctcgcgcttgtcgtccgccacggtgaacacctccagcgggccgttgacaaaattaaccttggaaagggccatggcgacgtgcgttcaggtcggcggtcgggagtgaattgaccggctatgatgaccatcgatgaatcatagtcggacacgtttttcaagattgactgtactcgtaaaacgaggtcattgattgacgcatgtttaaatatagcaaagccatcgataaatcatagccggacacgcttttcaagattgattgtactagtaaagcgaggtcattggttgacgcatgcctaaatatagcaaaggcatttatgactcataacaggacacgattttcaagtttgactgtgcttgtaaagcaaggtcattggccgacgcatgcctaattaatgagtcataaccggacatgtttttttaatatcatctgtgctcgtaaaacgaggtcattggctgacgcatgtctaaaaataacgcactagttttacaagaccaatcgtactcaaaaaacaaagtcatcgatgagtcataaccggacacgcttttcaagattgactgtgcttgtaaagcgaggtcattaactgactgatacttaaaaatatgaatcataaccggacacgcttttcaagattgattgtgcttgtaaagcgaggttattggctgaagcacgtataaaaatagcgcactagttttacaataacgataatatttgaaaagctagttgattagtccgcgcacgtcattatattttactcgcgatcgagtgtccaaaaagaaccgatgcgtgggttcgtccagtccgttgcctgacaacggatatgagcctggcacctcgaacgcaaacgcagcgtccgtgttgctatcgaacgtgtcgctggggcacagcagtttgttgtttgaaaaatcatttatagacgtgtacgtgtttacgcattcaacacgaaacttgtgcgaggccgtggtcgtgtcaaggccgtccacgatgcttgcgcacatggacgaacggtcgccggacacgacgtgacgcacgcgcgtcacggcttcgtcgccgcaatcgcattcacccgtttcgaaattgggacgcacactcgtgtgcacgtaattcacattggtgcacacgttgggcaaacattctaatgggtttagtggatttacaaacatgagattattgttgttatcgcgcgcgttgcagcgcatttcgaaccggcgcgtgccgtcttccaacaactcatcccagctacgcctaaacgtgttggtggcaatgttgacttcgcgacctaacaaccggtcaaacaacacgttgcggtcgctttgcccgggcagaatgcggtcaaagtgttggcgccccgccagctgagtcatgttgctggttccggcaaaatagcgtgggtcttcagcgatgcatgtccattggtttaaactcatgagcacaacgcttgtttcgcgattgcaatcgcgaggcacgctattggtggtgcaatagccgcccactgcaagcttgtgcccgttgactacgtaagtgtcacctttgcctacgaaaaaataagatgcaacagggtcttcgcacacttgagtgcaatcgaaaaaaggcaaatcaatttcggtgacgtacaagggcacggacatgcatttaagagtctcgccggccagcgtgcccagattagtatcaaaccgcaccgaaggcaacgtttccatgggcacgtaatgcctgcggcgcatgaccgattcaatataatccattctatcggtcaaagtgtcattgtaatcgtgttgggcggtctgtatgtgctgataagcttgatgaaagggccaaaccactatataaagcagcgcaaacaggaaaagcacaattagtattcgatacatgttgccaatacttagtagttttaaacatgttggctcaaattaattatattctgcagctattgttgcacgcggcgttgtacacaatcacattaatcgcgtttgtgttttcgctgatgggaacaataaatcacaaatacgcgtttttgctcgagttggaagacgaagaacattctgtgataaatctttcggtgctaacggcgttcctgctcggcccgtgcgtgttcaccaccaccacttgggccatgtacaaatttttgttgtgctataaacgcgcagagatgcatagcaatttttacatgaagacaatcatctcgctggcccacatgatggcgttagtttgctggacactttttgtggtgtttcaacctcaaatttacaaaaacggacatgttcccgttctggacgcaagataccgagattacgatcgtgattcgttgtgctggagcaacatcgtgtcagatacatatgaaattcacgacacaaacgccatacgcacagatttcaattgtgtatacaaacacgattttgttaaaaaatgcgtcgggtgcagaatggaaatacggcacaacgaggccaccgtgtttaaccagaatcaatgcgcgctgattatgatggtaatgatgacggccgtgttgcaattttggaacatgtacgtgcaaagaaaaaagatgcgttacaaacctacgcccgtcaaaacgctttattttgagagtgcgccgttaaaggaacaagataccgcggacgaagaggaagaacatcaaagcaattttagaatgttggaaattattagcgaaccgcgcgtacaatttaagttttccaattctagttcttcagacaaattgtcatcgtcacctccaattatgcaatcgttatcgttaccacctagttcgccagacagtggaattgattatgacattcctcaacctttttacagtgtgcctaacaaaattgtatgtaaagtacctgtgccgccacccatgccaaagcttttttcaccgcctttttaaatttaaattttagtaataataaaacttgtattttttgtacttaaagtattatgtatagtatttactagtttgtaagaaagagcaatatgtaacccataccaaataaaaccaaatttaatattaataatatttttttattaatacttccaacacgcgatttagcaattgatgttgcacagtgtatccatcaccgtgcacaatgcaaaagtttaccaacccgtttagcactaaacttttgttgaacacgttgcgttctagcgtaacaataaaatcaaacaaatgcaacagcgttggccatgtaaccatgttgcccgttacagttttgatggcaaacgcgatggcgcgttcacaataaacgtcgtggcttgccatggcaaactttgagacggcttgttgcacgcgcgcagttgtccaatcaagacgtgtcctttgcatactaatattattttatcatggatcgcgtggcagaccaaatttactcgggcatgttgccttacattaccacaagggacattgaagattgtctgcgaaatcgcatcgccgccaaagcgggtacgcaattttttaaaaattgttttgaagccgtgatggcggacaagagcgggttgtttgtgcttaacggcggagcggccgccgcttgtcacgttgacgaacagcgtgacatgctaaaatgtcttgattttgactattacaattctagcaaagaatggattcagctagccagcatgcagcgtcgcttgcaagcgtgcacgcaaagtgtttttgaaaacttgacgcgtttaaccaacagcgttcgaatgcaaagttatttaaccgttataaaatgttttcaaaatggtgcgtttcgttttaacaataacgtgcaccttcacttgttgcctcatgttgaaattgtgcgcacaagttttaatgaagagtttgacctgatcaggtttgcgctgcaagttgaaatgtggtctgaagacggtgttgaagaatacgtaaaccaaaaatggatcataaacagggacgcggtgacattcaacgtgtattttgtaaatgtgcgcgtcatcaaacagccgttttttggggaacactgcactagatttttcaacatgtttggttattacgtgcttgtgtcgccgttgcatcgagttttaaacgatcagatcatgtgtttgttgaaagacatttttacaaacaaagcagatttcaaagtgcagcgtcgcgtaactttgattcgcgctctttttgaaaaactgccgcatagttacgtgtgcgacgacgtggcaatcgacaggcatcgcaacgagaacattaccagtttttgcaaaaaaactctggatatttacggaccggcgttggggtgtcacaaactagtgtacgcgtttttacggtccgacgcgtttgttaaccaaattccccattatgtggccgaccattttaattacccgatgagttggcacaattgtgagcaaaagtggaaagagtttatgggggttatttgtttgttgtagtaaaataaaaacacatgtattttaataataataaattgtttatttttaatattacaacggtttttttatttacattagttaaatttaaaaataaataatacagttaacaattgtttacccgtcacatagttaattgcaggaacccatttcgaaacattggcgtttctagcgctaatatcagttttatctacattaataaattttactacattattaactaaatcagattcatatttatcctcatcgttatcattataaattaaccttttcagcgcgctccacaccccttttaaataagcctcgttaataaatactttggccaccgtttcgtggcgttcgatggcgtgcacggcatctcgcacgcgtcggccagcacttacagcagaaaaaagcggtccaacaacaaacggcaccgtggcgccttcgtcgtcgtgcttaacaaaaccatcaaaattgatctctttttgaccgtgcgcattgatcacgcacacgctgtcgtaacggctgcacacggtgacttgcaagtaattgttattaaaattagtaactgagattaatactttgaatttggcaaacggcgatcggcattttacgtttaggcaaaattcggcatcggcgctaaccgccgtcagtttaaagcgctcagtctgcttcggttcttcgacaccacgcaaattaataggtacaagcgtcaccgtcaaattcatcatgtaacacttgctgtgctataagctttgcgcttactattttgtccgcttccacaatttcaaaacgtttgttggccgcgcgcgccaccacgcccgatcccaacgaagtctcaagcgcttttgaaatgcgttcgcggtcgcgtatacagttttttctgcgcgcacaaaacacttgttcccctccagcggcgctgacgtccgctacgcgctgacgcacaaactgctcggaaccactcattgttaataaaacatttttgctcaacattacggcgaaatatttgctgccacgagcgcgttccgcctgttgtctgtccagttgcgcggccaaatttgcaatgatgttgttctttttgcgcacaagtctttgcatgtttttaacgcgccgtttttgcagctgcgtcaattttgtaaagtcaagccgtgttttttgcaattgcgcaatcacttgtgcaatcctatcttggtgttcttgattaaccaaattcttttccgatgttgtcgacacagttgtggtggtgacgacggttttcacaaaagtggacgactgaatagcaccgagcgcggcggcgcgtttaggagaggcaatcgggcctggcagcatttttggcgtttccatgtgtctgatcgcggtgatgttgcgcctttgaatgcctgtttgacaataatgacctgctttgaaggtgagcgtttataaaggctggaagtgcgcagtcgcaaggcggggcaaaaaaaaaccaatgtttgcgtattacatgtatttatttaggtaatttatcctgtaattatgaatcattacaatggaaagcgtacaaaataatctgaataatctgtgttggcggatggtgatttcagcgaacacgccgaccgagtgatgtcatgaccgaatcgaattacgcgttccgtgaatttgatagctttatcagcaggcgtggcttcgtcgaaggctacaacgttgagtaaatcagtcatgcgcaattgatacgccagtcggttggcgatcacgtcgccgactgcaagtgcgagttgcgctgcagaaacggtgacagtgtttaatgcgcgtgcgactccaaattgttccagtttggcagaatggtgaaattgatcacccatcataggcaaacacaccataggcacgcgcgcatgtaacgcttcgtcgctggattgtaggccgccctgcgtaacaaacgccacaacgtttgggtggttaaggacgccgcgttgattaaaccatttttgggcaattacgttgcgaggcaacaccaaagacgctgccacagcgtcgtccaccttccatagcacggtgcggttgtccagtttggcaaacgtgtccaaaagcatttgcaaaaattcggcgtgaatggaattggtgtcaatactggatccaaagctgacgtacaccgccccgtttacggacgcattaaggcgtttttcaagctcaatatctaagggttgtggtggctcgagtgtcaaatgcaatcctccgcccaaatattgcacactaggcggcaccggtcgattgttgtcgtacacggggtgtaggttaagcaatagcagctgcacgttgttgcgcaattgccgtatagtaggcgtgttggggccaaattgcagtttgagcagcgcgtcggaacggcgcgccaacaattcaaattcgttgtacagacgccattcgattagcgctccgtccgcgttgccaatcgagctactgcgccaaatgttggggtagtggatcgggtggcgtcccacagcgccaacggcgtcaaagttttcggccaggccgtagcccggcgcgatctggatcacgggcgctggacgaaacaggtgaccaaatacgagcgcataatcggcaaacgcctctaccactacaacgtcaaaagtgcggtttgtggccaaaaaatttttcacgtgaacgttgtcaaactggtcgcgaaacatttccactaaccccatgtaattgtccgccgtgacggtggtttcgtctgacacgacgccgcgtttgcgaaacgtgcccgaacttgccaccagttttttgtattgctgcgaagacatgtctgcgtcgatctgctcgatacgaccgcagcgttgtttgtttgccgcatcgtaatcaaaaagttgcggcttgaccacggtcacgttgtggcatttgtctgccaaagcttgcacgtacacttgattcaccaggtgatggctataagccggcgtgggtaacaccgctagaatatttgcggtttttgctccgcttactgctaaaagcgttgttagtaaaataaaaatcatcgtaaatgcagttcaattgctgctgctctttaaaacagtgtgtacaataaaaagccgtgaccccgattttatagacgccctacatggcgccgtgcaagtacactaatgtggaccaaatgtggaacgcgatcgcgtacaacgacagtcgcaagtttgctttcatgaccactcagggacgttggattcacgccgaccgatactttaatagcgcggcgcaactgttaagctacatgatcaccaattcggtaaccgacgtgcacgtaaaaccgttggacgagggcggacgtgaatgggtgtttgacgccgatttcaaagattgcgccaacaaggctgaactagagttaaaaataaacgtgggcgcgaccgcgttgttgctattttttgccgacaaagaggacgccgtgcaacgcgtcatgttcagtggcaaccgtgggtttcatatgtggctaaagttttgcggcagatttagaatggactcgccgaagaacgtgcgcgagcattggtttgaagtgttcaagaaacccaacaagttggctaaagaggacattcgttccggcaattttgcttttagcgttcagcaggcggtgaacatgtacatagacgaaatgcctagaggcagcgacgtgtgcgatttaatagtgcgctattggcccgacgtggatcgggacgtgttttgcaatcccaacaaacaaattcgcgcgccgttcagttataattataagggcggtgagttttcgcgctgtttaactcagcaattgctacaacacatttcaaaatgttcgagtgggtgtttggatggtggggcggaagcaacggcgacgagcagcaacagcaaaactttgtagaatttgacgaacaagcctacaagcggtatgcggtggaccgtcgggcgcattcggacttggttcgctgggacgtgtttcgttgtcacccgtttacattcaggtttcgttacgtggtggacgacaacaatgggcgttgctgtaatgtggttgatttttgtaaaggtttagaaattaatcacgatttattgctgagttgcaatctaaaccgtcaacatgtttttcaactgaatcaaatcgtacttggcgctccacctacggattttaacgccgactctttaggcagcttgtttgccaccaagcatggtctgattcaattgctgcagcaattaccgtttattaacaaagacgacgtgctgatggccattaaaacagacaaaggttacaatcatgacgatgtgcgcgacaaaattgaaactgtattgaaacacattaaagcactcaacgccaacagcgacaagtttatcagcgcgcacaaatcgtttaaacttgaagtgaacgcccgttttaagcaaatggagcagcgttttgaaaacttggataatagattaaattctataccgcacgagcgcactacttcatcaattgcaataccgggcgtcgtgtttcctcgcgacgttaccaaacacgaacatttggccgtgtttatgaacagggtggatgacggcactcagattgcatttgcgcgcggtcagcaagaacattttcgcaaacgcaaactaaagtttgaagacacaatggacattatgtttgaaggcgtacaccctaacccagtcatggctgttaaccgcattaaagaggagttgtatggcagcggacacaaaatgaaaaaactacgaaatcgcgtgttagaagtaaaatgtaccgtagacaccgctaaagacattgtaaaaaaagctattttataaaataaaaaagtttatataagttaatgattattattattaccactattatgaaccctaacaataatgacaattattatatggacacgggcgatgaaaatgttacatacattcctgttaaagtaaagtcaaactcaaatgtttttgaagacactgacattataataaaaaaagtttgtttcgaacaaaacgcaccgcccgtgtactatgcctataaatgtttgcctatacaatttcctttaaatattagagatactcaaaacgaaagaaatagcactaaggaattggatgagtatgatgtgcgtggaataaccatgtcaacaatcgtgatgagtcctcaaaaaataaataaaagcgtaaatttgccaaaacaaaatttgaaaccacaatttgcctacgataaaaatataaattttaacaatcgcattaatgaggcacaggccaacgttttaataaacaatttaatataaatgaccttgttttacaagtacatttatacttgtaaaacaatataaattatggctttgttttaaattgtaataatgaatcattacgtgcgtcactgctgattttaatttacaaatacaaacgtactagtaaaacaatatgtatacatgcgtcattgttgaccttgttttacaagtacaatcatacttgtaaattaatatttatttttagacatgcgtaataaataatcttgttttacaagtacgatcgtacttgtaatctttataaattttattgtgcattgttatcggtttatggcgatatttatttaagttgtgcgtcatagactggtatataagcgagcgcgttggcttgcaaattcagttgtgtgcagactcggcaccatgtattgtttattgatttgctctgcgctaattattagcggttttgctgatccaatcagctttgagcctatcgacgacgccaccgggctcatgttcgagcgcataagttctttgcgccacgtttccgatgaacggtatttgtttgtgaaagctttggactacagccctctgctgcatgaattaaaaaacattgcaaattttttgcgcgacgacgttcgcaacaacgctacgggatgtccgttggtgaaacttatcaagcccggaaagccacgcgcaactatgaatcgtataaacaaggatttgtcctcgttgccgcagctggacacaacattttataaatatgacttggacaactcgatgagcaatgaagtgacaaacgatgtcgtttttgattacgttgaccacaggcaacaagatgcggactacgccgacacgcataacccacctcattggagcgaagtgagtgttatggatgtgcgcgcattgatgcgcggcggctcgactaatcgtggaaaagttttagccgcagtgtctacctccaacgtgacagataacttttcaaattacataacttgtatggacggaaaccgaaccgcagataacaattgcatgtatatgaatgacatgcacaaaatgatgaatcgcaaactcgctgacgcaactgcgtttgccaacacgctggatagatttattaaacaaacacgtcgcaacaaattaaacaacactaacaacgtgattgatgacaacgcgttactgcacgagatgcgccaattaattaggatgttaaccagccaaaatttgagttgggttgtggattttgaacgcactttgaactcgcattttgacctgtcccaagcgtacaaactgcacttgtttgcggacgggaatattgttgtgctgtgtattgccatgccgctcatgcgacgtgtcacatcgatttatagcttgtatcgcatcgcgacggtgcctttttgtcgaggcaccatgtgcctgatgatggtgccctcagcgagccacattgccgtcaccaacacgcgcaactattatacaattgtgcccgacaattatcgcacagtgtgtaaagagtttacaggctacgacgaatttttatgtcctgcaagtgaacgcattgctacattgaactcgggcgtgtgcgaaattgaaatgtttatgggccgttatgcgcaggacattgacgcgctgtgcgacgtgcgagttgcagataacggcgccaaacaagtgttactagatatgcttgttcatagccgtaaatggttgtatgcgtttgcgcgcaatgccaccgtttcttacgtgtgcggaaacacgtatcatgaatttttgacgaccgtatcgcagggtgtggggctggtggtggtgcagccgttgcaatcgtgttcggtgcgcgtcaaccagggtgcgctcatgttcacagtgaatacggaaaattacgttaccgcttcaacatcgtactggccgagccgccgctttgattacaacaaatatgtagacgcttcgttgctgagccagacttctacgccgtttgcggacgcaataaaaaacctaagtctaactcaacttaaaacgttgcgttcaaggtttcacattcgcgattacacggcggcgcccaaaaattttttttcaccgcgtaacaacgtgcactcgcctcaaatagttgataaaagcatttctttgatctatgtaataattattgttttagtgttaggcattgttggcatcatgtcgggcgttgggtattgtgtttttaaacgacatcgcaataatcttaaagatgttccgtttactgtgtcgtttaaaaatgaagaactgcaacctataattacaattggtagcgacgcgcacaataatgtgcacattaaagtgcccaacaacactgtgcacacaacttctatgggaatgtttccaatggagattaagcaaatcaataataaaattatgtaataaatcaataattatgtactaattttgtgttttatttattacttttcaacatttaacgttagtgttagaagacgttcgcacgcgttccgtaagtgggcacgcgttccgtaagtggtgatatgcaaaatgcgtaactccgcaggcctgtttatgatcatggagccggacaaagcggtgttgctgtgtgcgcgtcgttcgtaccgcggcgccgcgtccattaacacggacacgtttttagaaaaaatatccataccgcgcgggcatcgcgattgcacggacgccaaaatctacgaaacggcagtgcgcgaatttgttgaagaaacgggtcggttttttcacagcgcgttcatttacaagtttccgttcacgttgcattggacggacgaaggtgttacctacaagtattctatctatgttggcgtagtgcgcggagcgcttgccgacgtcaaatttaagcccaacacgtacaacgtcaagttgttgccgggagcgtttggtaacgattaccgcatcgtattgcgaccgcgccgtttcaattgcgagattgcccgcagcgtgaccattgttccgctccatcaatattttgagtacatgacaaacaagcagctaaacacgtacgcttcaagtaattacattgaattttttaactttgtgcgccaagttaaaaagctgtttgacaacaagcaactgcacgattttttctatgcatccctcaaacgcgtcgagtcgcacgacgttgacgccaagtcggcgtgcgcgcgatcacaacgctgattgttttacgcgcagcgagctgtacgcgttgtggggcgagacggtaaacacgctaaagcgcacctttcaaatcaaaaacgtgcacgcacatatgctggaagataatgcgggcaacgtaaaagattatataagagagaatttgagccgttttacagtaattaccggcaaatgttccaagcgtaaggtgtgccaccaccacagacgggttgcaaggacattaaacctcaaaaataatttagtagacgaatacatttgttcagtgacggacgtgtaccagacaccaagatggtcaatatgccagaaaccgtgcgcgacgagtcatttaccagcaacaacgctatgttaatcaacaaattggaaaatagcgcgtttaacaaatgcaatttggattatttaaaaacctgcattaattatttggaaaagaaaaacatcaactacaccgttgccgtgttgccgtgctctggcgatgatcgcaaaactgtaaagcgtcctaaacgagtgagcaaccacaacatgtatatcttgtttaacagtttttacacgaaaattcgcaagcccgaatggcccaacagccctgtcatgtgggacacggttaaagctcaaaaggaattgacagattttgttttgctgtttgaccacacgcaaaagctcggcaaaaacatcacaagccgctctgagtccacttcttcaacggaaacggcgccgggcaaacgaaggcgttttgtgcccgttgccaatccgtctgaaatgcaagaaaattgcgaactgcgcgacaaattgtacgccgaattttacagcgtgctcaatgaaacttttaaaaacagcgttgcgcccgctaccagcagcatttacgacaatttagtcacaagagagtttgttactaagaacatggagttgtttaaaagcgttgcgttaaaattaccttcagccagctacgtgcctacacctgttagcaagaaacggcgagctgtacccggtgctcccaaaaagattgcagccaagcaacgccgcgacacaaagccgccgccgccgccgcctgtttacgccagtgataacacccaagacactaatatgtcggaataaataaaataaaacattattttcttaaaatttttgtttaattgctatatattattacactgaacaacgacacttatatattttaataacgtcacacgcatttttgattatattaaataataccgcacgtttatttattgccaccgcgcagacgcaacactaaatgtagtgtagattctttttgtatattataatcggccatagttttagaatcttccaattgtttgcccgcataaataagcctttgttgatcgacgggaacgccttctttgtcggcaattttttgttttacctggccaacagaatcgctgggttccgtttccacggtaatggttttgccggtcatcgttttgacaaaaatttgcatttttaaactcttataaatgaccaaggtattagttaaaacgccgccgctatacgggggttgtttacaacagcaaatagcaaaattggcccaagcgcgagtgcagcgcagttacgaacgtgatattggtcaattggcaaaagaattaaaagaacgtggtgtaccacgtggacatttaggcgatgtgcttgaagttatgggtcgtcaaagcgagctgttgcccgatctaattaaaaatgacgatgattttcgccttgtacaacaacgcgatctttgtcaaaatacaatagattacctaaattttttacaacatgacaaacttttttactgccgtctttgttacacgcacgccgattggttgtggtgcgagtttcataaatcgcacgcttatagaggatctcgcgatttaaccgtcgacgcgtacgtggaacacttaaacagcgatatgggcgtggtatcattagtcgaggaatactaccattgtttgtcatcgtccaataataaacttgaagccaaacgcgttctcatgacgctaacgaccttcgagtcgctcaacgacctattgggcagtcacaattattccgccgaagacgcggacacgtccacgtacgagcttatggattttgaataataatgtggactttgcaattgcccggcttgttggtgtgcgcaaaacacgaccccgcacgcattaaaattgcggcttttgacctggatggcacgttgatagccaccgcatctggcgcgcggtttccaaaaaaccttgacgactggcgccttttgcccgcggcgcgcgttttgccgcgcctgcacgcggacgggtttgacgtagtggtgtttactaaccaggcaaatttatcgtcgggtaaattaaaacctgaacatttgctaaacaagttaaaagccgttcaggcaaatataaacgtgcccatgtcgttttacgtggcctcgcacaaagacacagtgtaccgcaaaccgcacgcgggcatgtggcgtaaaatgcttgacatgtttgcacacgtggacgtttcgcagagtttttacgtgggcgacgctgcgggccgcgtgtcaccgaaacggtgcgactttagtgattcagatctgcagtttgctaaaaatgttggtgtgcgcttttacacacccgaacaatttgcacagctagatatctgtagtgattagataacacattgagtataaaaggagcgcatccgctgcacatattcaaaactcatcatgcatcgctttgctctagtcgtggccgctgtggcctctttgtgcgcctgtcagcaattggaacacattaccggttcgcagcgactcgtgcatatgtttgtgcacaaccattatttggcagtgcacacagacggcgttgtcaacggcaccctggacccgtacagtttggacaccgtattgcaacgcgtcagtcgcttcaaacacccagcgcgtcggactattttgttgcgcaacgccatttcctgcatgcacgtgtgtttggatagatgcggtgttatgtacgcttctgccgcgctatccagcgattgttttttacaagaaactatagttgaaaacaattatgatgtaatgttcaagatttacaatcgcaaattgacctatgtcgctttagacaattttggaagagctcgccgtttgcagttgtcaagacgcagaacattgggcaaattgagcatgtacgcgttaatattgcgcagtccgttaaattataccagcgtttcgcagtgtcctaaacaaactaaaattgttaaacatcgcaaatgtaatttgtcctaaattgtatatttttgtgtattaataaatatgttacaaatacatttttttgtaatttataagtaccctttaaaaaatatgcaattcaaaagtatattgattgttgccactgtattaatagtgggcgctatagcgtgcactgaaactggcagaaattgtaagtacagttacgaatgttgcagcggtgcatgttctgccgtgtttaaatattgtttgcaccgttaatttttaaataaaaataggtaaattattaaaataatacacttttgtaaatttaatttatttattgttcacacacaattaaatatcgcatttttatttgagatgtattatatattacaaactcgtcgaaagcagttacggcttggtttgcaggcacaagttttccgctaggcaccaacacgttatcgtcaattatttcgttagttgcgggcgttaacgcaccaacgccgtgcaccgaatgtttaccgtcgggtaaagcgccgctgcgggcagcgtgacagcgtaatggttcacccaatgccacttcgcacaagaacaacaacgttgactttgacttgcgagctgcgttagaaaaatacacgcccgcaccaaacatgccacttgccttggcacggcttgtcttgaatccctcgtgcaagatacgcgaaacgttaccaatggaagtgccgtgccacagcaattggcggttgccaagttccgcagcatagcgaacgtcgtcggctggtcgagcaatctcaaaaatttgcttgagcattgctggccgcgagttgtcaacataacgccgaatcaacgcaaatcgaggcgattctggttccaacgcattaattgtggtgtgcagctgtttgtaataaaaatttattaaagaatatgtgtttattgtcaacgtttctggcgcgtcgccttttttgattatttttaacacttcgtcgcgcacgttccacgcgtgctcgtcggctatttcttttaaaaacataacgttgaacacgtgtttggcgattagttgatgcactggcgccggcaatttatttttgctcacgttgttttctctaattttgttaaacataaaactgagcgcgcgcggcgacgattgcacgacaaatttttgcaaacattgttgcaagggcaaattgtccgcgcgctggcgatggttgacggtgttgaaagcgccccaatgttgcaccaaaaggcaatcgtttgcgtcgccgtcacgttccaaaatctttaaacaataataataatgtacgctttcttgttcaaattcgtcttccgccacccacaagcggttgtaatcaccgcccgctgccgggccgtacgacgggtattgctgccgcagcgctgcgcagtttttgatgaggatttgcacctctttgcttgccgacactttaaacataacaaacgaccgttttactcaaagttttgtaacaaatgccgactgtgttatagcaatcgtgctttttaagtacgattaatcataaaaacatgttaacaatacgtaagtagtttcgtaaatgaaggccatttgcattatcagtggagacgtgcacggagaagtgcactttgaacagcgcgctcccgaagaaaccgtttacatcaccggccatttgcttaatttgccgcgcggcttgcacggttttcacgtgcacgaatttggcgacacaagcaatgggtgcacgtcggcaggcgaacactttaatcctacgcatcagcagcatggcgcgcccgacgccgcggagcgtcacgtcggcgatttgggcaacgtgcgctccgtcggctgcaccgcgcttacgccaataaacatgagcgataacgtaatcagtttgtacggcccgctgagtattctgggccgtagtttggtcgtgcacacggaccgcgacgacctgggccttaccgaccacccacttagcaaaacgacaggcaattcggggggccgcttgggctgcggaattattggaataaaatgaccttgctttacaagcacagtcaaacttgaaaatcgtgtcctgttatgagtcataaatgcctttgctatatttaggcatgcgtcaaccaatgacctcgctttacgagcacaatcaatcttgaaaagcgtgtccggctatgattcatcgatggtctttgctatttttaaacatgcgtcagccaataacctcgctttactcgctttacgagtacagtcaatcttgaaaaacgtgtccggctatgactcatagatgcctttgctatatttaggcatgcgtcaaccaatgacctcgctttactcgttttacgagtacagttaatcttgaaaagcgtgtccggctatgaccttgcttttcgagtaccatcgtttgtgtaaaactagtgtgcgctatttttaaacatgcgtcatcatcgccaatcagttcactcccgaccgccgacctgaacgcacgtcgccatggccctttccaaggttaattttgtcaacggccccctagaggtgttcaccgtggcggacgacaagcgcgagaactggatggtcgccaacccgttcgccgaggcgttgaattattcaaggcctaacaaagcaatatgcgaaaaggtatctaaagaaaatgtaaaaactttagaagaattgcgatcgcaccgcaacggtgcgattgcgtcatcgctgcatccacaaacaaagttcatcaacacggcgggagtgtttgagctcatcaacgcgtcggagatgccggcggccaaaaagtttaagcagtggaacgccaacgatttgctgcccacgttgtgcaaggagggcgaatacaacatggcggtggacgcgcccgcggagatagccgagggcatgaacgccgtacacgcggcagtgaacgacggccgcaaagcgccgtggattaaggacatggatgcgtataagcaaattatagtagaaaaaaatgaaaaaattgaaacgttaactacaatgttggtggagagcaaccagcaagttgtcaagtttgccaacgcactagttgtagccaacgaaaatttgatgaccgccaacaacaaccttaaagtggcaaacaataatttgcacgaagccaatcaatcgcttaaccacatggctaaccggatggcggacattgctcaggatgttattgccaagcctagcgacccgcagctgttgcattcgttggccgtgtgcgcgttgggaaacgacgagtacgcgtttttgcgcgctcaaaaacgcacattaggacgcagtttgcgtcgtttgggttcaagcgacgtggtgtttagcagcgactatgtgcccaacgccatgaatgtgctaaataaagtaaaagaagcgttgccgcgcgacaaattcaaggccaagcacaacaagattacgctgcttgaaaacttgacacgtgatcaactcattgaagcggtgcaatcctccatgactgaacgccagattgctaggagatttaatgggcaaataaataataactaaacattaaacttggtattttatttattacaataattgttacatttgataaatgcgaattgcatttgaaatctttgcgcggcacatggggcaatcttttaatacaattgcgcatttgccgcacgccaacacgtgaccgcacggatcaaaacacactgttttctcagagccaaagcaaatcttgcacattttgttttctggtaaattgatttttgcgggttgctcgacctgtttaatttgctcgacaggattattgtttatttcttttttaatgacgcatgcttcgctaatcacccgctgcacgtagtcgtgtcctttgaccagttttacgaacgaacagcgatcaaaccaacgtgcatgttcctcccacggttcgtcggcgtttgcccaatccttaaggccgccgtcgcaataaaaacatttgactttatcacctttgccggtgtagtaaaaaccggcttcggccaattgctctggcctttgttttaaactaagtggccaatcctcaaaagtttttaaacgtgcagactcggagccgtatttagggtgtatagggccgggcatcacacgcgacgatccgcattcatcttgaccaacaacaacttgcactgctgcaggagtggattgaatgtgtgtagcaattgtttgattttgttgtgcagtattttttcgcaaaaacgggcactgtggcgcccatcgtttatgatctacggccgggtcgtcgccctccaaccagcgcattatttccactttgcagaacgcgcagcgcacttcgtccgcgcgccccaaatagtagaacccgttggcggccatttgacttggttccaaaaatgacacgggccagttaacgtatgtagcgagacgcgcgttctcgtctttcatatcagacatatttacgtacattgtgtgtcaacacgtttaatattgtaatggaacaacgtcgctttataaacaaattcttaatcgatgaaacggatacaatgattatcgcattaccacctcctgtggcggagcttcaactgttaataatattaatgctggcaagccttcctatattaacaatattgctgtgctcaccgcagatgacggtgcaaaattgcactgtaacgaatggcgcgttgatgaacggcttgttgcagtccaccgcgtccgctcacacaacactgcacgccgtttgcgtcgcgtttactaccgtcgccttttttatgggtttgttgttggacggagcggcaggccgccgccccaaatttatggcgcttgtgggcgtcatgtatttcaacaatgtggtgttaattgcggccgtgatcaagctgttttcacgtgccacttttggtgggggcaaattacttgatggccgtttgcatcaagacgccgtacttgacgattctgcgctattatgtgcgttgtatgccgtgacggtgttcagcgtgttgaatgtcgcgcgttggattttatttggatggactacgctgaataggtgttgcgatttaatcccgtttgccgccaccgcaattgtggttacgactttgtacgtaattgcgctcatattagctgcgaccgttataccttataacggtctaatcatgtttcgcaacgcgtcgtttgctttgtgcaataaaacagataatgtgtatgatagagtgaaactttatttataaaaaattttagttttaaacagacgatttgtgttttattttatatttcacacattttattgtaataattaaaaattaattgatttaaattacatttaccaaagcgtttacaacgctgtgacagctgcttaaaaaatttttcgtccaacaatggcacaaagcattgtacatgtagcaaatcccaatttttctttactatctcttcatttagtttgttgacgtgttccattcgcagtatgccaacaaatttgagacattcgtgtccgacgttgacacaccctacgccgtttacaaacggcaaattaggagaagctacgtaattcacgtaggtgcgcacagcatcatagtttatataaccgggccacaaagtggttgcaacacagtgcggtatccatacgctatcgctgtacatttctgcccattttagacacattgttgtaaaaagtttttgttcaaataaagattgcgcaaaggcaaacaagtttacggtgccaacaactgtggcaaacgtcaacgcttgcaacgaagccacttttttgtgaggcatcaacttgttgcgttgtatttgattattgccgtacagggtagcaggtctgctcgacatggcgccgtcacgctcgttgcaacgcgcgattaaacaaaatcaacacgtgcgcgttgccgatttggccctcgaaacgaaagctaatcgtttgtttttgctgcttgattgtcacagtaaagaattttggatggacgtgtcgcgcaactgctacaatcgcaatcggtttctggcggcgtttgcaaacaaagtggattggaacgcggtgtcggcgagtccgctgaccattgctacggccaggacgtttgccgataaactaaactgggcaattgtgtcgcgacaaagccatttgacgcagcagtttatttacgaaatgggtgaacgcatggacatgcagatcgtaagcgccaattacaacaacttgtcgcttgccgtgcaacaaaaatacgcagctattcttaattggaattacattgtgcctagccattgcatgttgcgcgaatggttcgacagccccattgcagactacatttgttttgatttagtggctaaatacaaacacttgaacagattgcacattaacacgcctcattgcatcaccaaaattaatttgaatgtttacatgcaaaatttaaacaaagttagcgacgcgttaataatttattgtttgcgcgaaggacgcgttcaagaattaaaagcaatttccggaaccatcccgtgggccgatcacatgtacgtgtttgacgagtatccgggtttagtagagacactgcacgccgactgggccaccgtgactacgtggaactttaacaacgccccgccggcattttacattcgccaacatttaaccggtgacgcgtttaaacgcgagtttgtagccaccgcgtactggaacaagtttattaattacgctaccggcacgcaaaactcagccagcgctgcgtttgcattgatggtgtttgacaactttaaatctcaactagattgggaaactttgttaccaagcgatcgctttgtcaacttggccgctttgcatcgaataaacgggccgcttgtcgcgtttgacgcggccaatgacctaaaagtgtggcgcgcgtacggcaagtttgttagcggtagcgacgttcaagaatgcaaacacattatacccatgaacatgaacgtgcgagacgcgtaccacaaaatgacgctcgtacaagcgtgcatgtcgcagcgcgaacacgacgacgcacgcacgtgcgaacgtttgatggcgttgaacggcggcgaagaagccgtgttgaattggaacatgttgtcagcaacgcaacaagtgtgcccttttaatttgcgtcatttgcaaaatgttaacgcgcagacatacaggcgcgacaacccgcactttgtgcaacaagtttacgagatgatgattgccgctcagatgaatcttaatggctttttatgagataaaagagatgagtttacctcatctgaccaaatttggaaaagatgttttctcaaaagaacaacgacaacggtcaatctctgaccaaacaattggataaaattaacgaacacaaacgcaaaattgccgtggaaagtcaacattttgaaaaaatctacaagctaacaaagaacacttcagaattaaagaatttggaacatcgggtgatggaatctaggcaaaactttctcaattttggagtaaaacatttttaataaaaacaacaattgtacaattaatgtgttttttatttattttttacactcaaattttccaaacggtcgcacatagatttgcgaccggggcttatctctccctcctccaagtcgtaaccgtgttccttggcgtacaattccagttcagtgtcttcgtcgctccacctgaacgatggaggcggcgttttgggcagtggcgaaaatggtcggtgtgaataacgacgcttgttgttttgatgacacgtaaaacgcacgccgtccggccaaaaatagcggccgctgcagcgctgtaacagctgacctacgcgcttgtctcgtacgcgcagttgacgtcgcgagctgcgccgccagtcaatgctaaaaaatgcgttgcaaggtgggttagcttccgcgcacatgaccgttatcaactcccgcgaaaagcgtttgctgtacgcgtgtccgttgtactggagctccatcattacgtcacaaatatttttaaaaaatcggttacgtcttgcctgcacgctgggcacttgccgtctaacgcaaaataacactgcatacacacacaaaagtggcggcaaggcaacaagactgtatcgcgttggcgttcaagacaaattttgcactccaaagtttcgttagcggtgttgatagtggttgtcacactttccgcaagcggtgcgtcatcgcttgggtgagcagtttcataaaaatgttcacctttgatgcataccacgaaatagcattgcgggttggcaatcgcgtggcgccgccacgggtcatcgcccggcaaccaattgcgcacacggtaatcgcaaaaaaagcaggccgtttcgtctcctaatttagtgtgaaacatgcccgcttccgcaatggatggtattaaatgttgcaacgccgccggccaatattcctcgaacgtggcgcgacgcgcgctgggatgcgccagacggctatacacgcagcgtggcttgccgggtgacaccaaaattgcgtcagtgctcaaatctccactaaattgctcgctttgcgcaattttgttggcgtacacgcaatacggcgacagcgtcgcgtgtacaaactcgacgcagtcgtcctcgcaccaatttttgattacgacattgcaatactcgcacgccaccgcgtcgtctacatgctcgtacctaaacccgttgacaatcaaactgttgattaacgcggtgttgtcgataggaaagttttcaaaagaattgtggcgttcgatcagcatgctaaacacgtgctcaacgctggtttcctgcgcattatcgcccactgttaaaatgtacaaaggtgaagcgttcatatttgtgccgagaatatcaacgcgttgcggtcgttttggttcaatgacacgttcaagtggcccaacttgacgcgcgtttcggcgttgatgacgtaaacggtggataaatcgtgatccaacactattagttcaaaatccaacacgttggtaatgtaacgccttttggaatcaatcttaaaattaaatttttttaattcgtctaccgaggcgtcgtcaacgatcttgtcaacgataccgttgcttaaatgttttaggattgcgtaatggtgcagtttgaaaggcgcgcatttgctggagctaaatgttaaatttttaagcaaatcgtcagttgtgtaaacgaacgcgccctcggcgcacacgtctattgaaacgtcctccatatcttatatataccaatttttaaaaagttattgtattagtattgacacgtacgtaatggctactaaacgcgcgcacgctagcaatgaccacgaagaggacgttaaacgagcccttgtggttccgcaagaaacgcaattgttaccatacaacaatagcggttttactatgaaagttgagaaagagggaaaattacgcgtgttcacgcctgtcaacaatatgcaaattcagttgcagcagcaacacatgagttggcagagtttggtgttgtttaacttgcaagagtttaattttactgttattaattcaaatcatggagatttgcagtttttagagcacaagtttaaagagttgaaaacattgtccagctattacgaatggcgcaaagaagacaagcctgaaaataatatttctattatggaacctcccatgggcaagtgcacttacacgattggtcgtcgcgtcaagggacgccccaacgggtttgccattgctgaatttggtagcgtaaaacgcgccaaaagcaattttggccaatttttaagcataacctggcctgccattcacgatttaaacgaagtgtttggcaacattatggatcaatattacaagtatgagtatccgttaaaacttgaaaccagcgtgtgcatacatttaccggaaaaagatttggaacgtgaagccaaagcacgccagtttttgtgggtgcgccgcgacaacaacccggagctgtacacgaccggccaattgaatcagccgttggaagtggtgccaatgactttaaacgagtttgactacttgtttgaaatgggcaaaacggacggaccgtcacatgaggtgcccgtactcgtttgcggttgcgttgacggcgtcaaatatggcaaagagattcaattgacggacgttaacaatcgcaaatttagtgaaaagccgtattcgctggcgtttaagcctattttgtttctgattctcgagccataataagcgtgccaaaatggattgcgacctttccgccgcggtaaaaaagggtcgcgcacttcttaacgccgcgcttaatcaacaggaaaaaaagattgataaatactttgtaaagccatcggaaaataatgtggaaaaaatgttaattttggctgccgacattcatggccaaattgaacagatagaagctttgttgtctgttgcgcacgcggccgacgaagaaaagcttgaatttgccaaagattgttcagatttggacattgacccggcagagttaaatggcgtgtgcaaacaatttgacttgtcttattttgccaccaagtaccaagcggccaaggtgttagcattgtatcctgcagcctacgacagttttttgaagcacggcgaacaattaattaacgctgtgcttcgtttaaatgcagaaaacgccactgttaattatatggttaaaaataaatgtatagtcattaagcatttgtgtgctatggagtatttgattgatcctttggtaaacaataaaaatacagattaataatgatattttgttttattccaattgtacaattctttgaccgtaatgcgtgcctgtgcgcacgcgtttaccacgtatgtaatcaatatttatttcgctatcgcactcgacaacgcggttttgctgcgcggctcgttttatagagttgaggcggcgcgttgacaactcaagcggattgtacaacgccgatttttctagtgtaaacgagttgagatgacctttgttgaaccactctagcgaaattataatgtacaacaaaaacaatgtagttttgtcagtgctttcaaaagcatacttgttttttaaacaataataataaaattttaaagaattgtatagataaaacataaaattgttaactcgcatgtagtactcgacatcggtaacaaacagcaaattcacaacacgttcttgcaacaagtgtgctaatttgcgcaaatatagcatagaatttttgtcgtcgtcgacgcgcaccagcaacacgttgggagtgtgcgcgtttaataccaattgaaagttttctgtttgcaaagcgtgcacgaccgcacgccaatgagccgcagctacttcaagacaaatgtattttttagaaaacacgtgtcgtttaataatttcgctgattgacgaaatcgaagccagatgcttttcaaatgccgggtcgtcccaaccgcgcacgctggtcggcgccgttacgtcgggctgatgcttaaaatccaacccgctctgtatcaacttggtggtgattaaaatgcttagctgctgaccaagtgtgtaatggttttcgtaaccacgctcccacattacattgcacgcaaacttgatcaaattagttacgcacggctgctgtaatatacgacgcaatcggtccgcgtcgcccttgtaccaccggtcgcggcacaccaacttgaacatgaccgcgtcgtgagcgctcaattcgggccttgtcacgtccacataatcgtctatgtcgtcgggcgtcgcgcacgtgacatgttttaattgctctaattgaaaaactttcacatcaaacacaaagcgcacaaatccttccgagttgatttgcacgttgcgcgtgaccagtcgtggcagctgcacgtcgacgccgctaatgtgcaagttgtacaacaacaacgcgttgtcttgcgcgcggcacgcttccggtaaaaattgcgtcgtgtaatgtaaagattgtgcaaacatgatgttgcaatcggttgctaaggtggactataaacggctgacctacgtggccgacatcgcgacaatgatgcaacgcacgctggattttatggcggtcaatggtcagtgcacgcgcgcggacgcgaccacgctgtgcatagcggacgacaccgccgcgtggttgtgcggtcgcaccgacgtgtgcacgttggcgtcgtttcgcgtgcgcatagccgcgtttaagcatccgtgtcccattttagaacattttttgtttgaagaaagtttggcgcagcgatgcggcggcccattgccgcgctacacgtacatgaactatttgttgtttaaaaatttgctcgcaattaaacttaccgtgtacacagacgatccgcacgccgatgggttaccgtattttgtaaagtttgaaaatggtcatgcaaaagcgcacgttcgccaaactgcagccgtacactataaattaccggcgtttgaacagtgcgtagaagaaattattgcgcagtcggttaatgaataacaaatataatggacaatattaaactgcagctgcaagaattttttgccgccgatgacaacgtgccaccgcccgagttggattcactcaacttgttggcgcaccagaaacgcgccatcgaatggatgttgcaacgcgaaaaacgcggtcggccgcacggcggcgtgttggcagatgatatgggccttggtaaaactttgtctgtgcttatgttgattgccaacgataaagatgtggcttgcaaaaccttgattgtgtgtccattgtcgttgcttaaccattggtccgcggagagcggcaagcacgatttgcatattagcgtgcgccagtttcacaacggcgatcctaacgaaacatttaatgagcatcaagttgtagtaaccacgtataacacgttgcattctcattacaaatcgttaaaaacgcagcatcgcgccagcaatttgatgacccaacattggcatcgggttgtgctggatgaggctcacgtcattaaaaaccggcatacagccgtgcacgcggctgcttgcgctttaaccgccaacaaccgttggtgcattaccggcacacctattcacaatcggcactgggacatgttttcgatcatacattttttgcgctgccgtccttttgacaacgtaaatgtgtggcgaatgcttaatcgcaacaatgacaccaaccgcattaaaagcgtggtaaagaaaattgtgctaaagcgcagcaaagcagagattgcgctcgacataccggaactcagcgttgagtacgtgcccgtgcggtttgacgaagaggaaaaaattgtttatgacacgctaaaaagcgagtcccaacgcgcgtacgacgacgcggtagccggtggcggcgacaaaactcgcaatatgcaagacgtgctttggttgctgtgtcgtttgcgccaaatgtgctgccatccggcgctaaccaagtgtgcgcacatgtttgcagaccaagcaatcatatttgaaccgcaatacgtgagcagtaaatgccgacgcgttttagagattgtgcagcaagtactcgacacgcccaacgacaaggtggtgctggtgtcgcagtgggtagaatttttgtatattgtggcaaaactattgcaacaacgcggcattcccattttactatacacgggtcagttgcgcgtcgaagaacgcaccgcggtcgagaaccaatttaacgccgccgactcgccgtaccgcgtgctgctcatgtccatcaattgcggcggcgtaggtctgaatttaaccggcggcaaccacattatcatgttggaaccgcattggaacccgcaaattgagttgcaagcgcagagccgcattcatcgcatgggtcaaaagaagcaaacgtacgtgtacaaaatgctcaacgacgaggacaacagcatcgagcgctacatgaaaatgcgtcaagacaataaacttacgtttgttaacaaggtgtttgatcgttcggcgctcaattacgaggatattaaaaagttttttagtttgtaataaaaatatctaaacaataacgtttgtttgtcaattaagttattgacattttacgtcaacaagtttaaaattagtacatatgaataaacaaaatgctcaatacgccaattgttatttgtgtgaagaaatagtatatttgtttaagaaacagtttgccaacacgtctgccactgcggcggcgttgtacagaaaacgcatggccattgtgcgcggcggctttgtgctgtgccaacgttgcaacgtggagcttaatggcggcggcaacgacgctaaccggcgataatggtcgctatttcgaagcaaatattgaacgcggctgcgttgcgtttacggtgcgacgctacaacccgcacgtcgtcgggtttgccggcattcgcgcgcacgtgttggaacaattacgagacaaaagtttgttgttgcctttttacaccgattgcacgctcagcaccgtgccgtccaggtgcggtaaatgcaaacgaagcttgacgctgtttccggccgtgtcgtatttgccttgcggtcattcgtgtttgtgcaccgattgtgatgaggtttacaataaacaaaatgtatgttttgaatgtaagaatagtgtaaaatttaaattaaaatttaaaaaataaaaattataaatttatttccttttgttttattttgataagcgtcattcaatatgccaattacgttgatacttgtgttggttgttgtgttatttatatttttgtttgctagcaccagtagtaacacaatcaacaacaaatcctacaccactaacaataatgaaatcatttcgtataccacgggtgttcctgttttgtacggtgatgagttaatttcatttgaacaatggtccaaagacaacatgacaagcatatttgcaaaaaaagcagaaaaggtggccaacccgacgcgcaattggaacccaaacacggtgtttgacaatttgagcccgtggacatcggccgctgattttggcacggtgtgccacactttaattggctacgctgtgcgttacaacaacgcggccgacgcgttgtatcaaagtcccgaattggcggacaatttgattggtggtttgcgcgccgtgtgcgagcgattacccgacccgccaccgcaccagcaagcgccgtggggccccgtagccgattggtatcattttacaatcacgatgcccgaggtgtttatgacgttgaccatagtgttgaacaatacgtggcattacgaggaagcggcaacgttgacgcagtattggctcggtttgtacttgcctacggccgtcacctcgatgggatggtaccgcacggcgggcaacgcgatgcgcatgggcgtaccgtatgtttacagtcagctgttgcgcggttattctttaaaacaaattgcgcacgagccgagtgttcaagaaacgctgcacaccgtcgcgttcccgtttgtagcgacgggcaacggccttcatgccgattcaatttacatcgaccacgtagatgtgcgcgcgtacggctacttgatcaactctttctttacttttgactattacacgcggctgtttggcgcaaacgcggttaacaccgagggtttgacacgcgccatcgagaacgtgggcagccctgaaggtgtggtcgtgccgggcgtcatgtctcgcaacggcacgctatattccaatgtgattggcaactttattgattaccccattgccgtgcattcggccgatttgtccaaggtgcttaccaaattgtctgacacgtattacggtgcggtggtgggtgttaccactcgattagcttattacgaagccgacccgacgaacaacacgcaagcgccgttgtggacaatgacgcgacgcatttggaatcggcgcgcacccatcatcaactacaacgccaacacgctgccgtttgagtcgggcgttattttacaatcgctcaacggtattttgcgcgtgcccagcaccaccacgtctacgcaatcgttccggccggccgtgggcaacacggcgcttgtcaaaacgcgcaccgctggagctattttgataaacgctcgttttagcgaaatgaacaacttgcaatttaaatcgtgcactttattttacgaccacggcatgtttcaattgtattataacattggcgttgaacccaattcactaaacaacgtaaacgggcgcgttgtcgtgcttaatcgtgacacgtcggtaaataccaacgatttatcgtttgagttgcaacgagttaacaatggcggatcgtctgaaggcactgtttttaacggcatagtgtgtcaccgcgtgcctattacaaacttaaccgtgccctcgttaaccgtaagaagccccaatagtaacgtggaacttattgaacaaataattagttttcaaaacatgtacacggcttctgccgtcgcctgttacaaattaaacgtcgaaggttattcggacgctctgcgagcgttccgcgttaatactgacgaaatttatgtaaacacgggtgcgggtgttaaagcgctgtttgcatacccatggttaatgataaaagaagacaccactgttgttttcatgtcggccctcgaagacacggtgataccattcaatgtaataacaaacgcctttagcgctattaacgaacccagtataatgtatactcctaacaattgttattacttgcacggcaatgggtttaaattaaacaatgactcaattagtttgcaatttatttttgatattatgcaatagactgaatactttaatatgcaatagactgaaaatatgtaaacgttagatctgacaaaagattgattaaaacaacattatattaatttataaataatttattattatattaaaacgatagttcacacttgctgctttgacatgtgcggtttgtcgttgttgtcacgtacacgttgagtttgataaaatccaagtcgtttttgagcacggcagtaaaaaaatcaacgatgccgccaaccgtcacaacaatttttccgttcacggtaggttcgcgcacgtgcacgacagcatcgttgaccaccattttgccaaaacattcgtactgttgtcgcaagccgctaatttcaatgttggtaatttcggctcccgttttaagtcggtcaaacgtgaacgacactcggttgggactttcaaatacaacgcgtcgacacgcgtggtgtttatcaatttttacgcgcacgttttgcaatgcgtccatgttgttgcaagattgtaactaaactaatttgtttttaatgatctaaacagtaacatgtttatttacatgataataattaaataagcgtcaacaagtttatcacatttttttgtaactaatatgattccaatacgtaatcgtcatttgactttatcatgtccattatgtaaagcaactgctacaaaaatgcgttgcttttgccaaaaatggctgcaaacttttaaaattattccgccaaaagaaactaatttttcaagaacaaacaaacttaaaaatcaaatccaacaatgagtcatatttaaatttgttttacaaaaacaattgaattcgtaaagcaaatccggctatgattcataattataaatgttttacaagaacagatatacttgaaaattgagttgaaaatttaatgtgttttcatgacaacgttattgcacatcaacaagctagacataacgtcaaattcgccgcaattttgaggcaagttagatccgcctcgcatccattgcaaactttccgttaaccggttgcccacaaacgattggtttttggtccactggtcaaaacgtgtgccttccactttttcatgacctgtgtagttatttttgttaaattctttgtaaatgttgtcgggcgcattgttaaacaacatgtacggaatgttgaatattgggtagcggcgcgcgtttggatcagcgtgattgccgccgcgcaccacgtatttgcgctcgatccggtcaaagttggactggcgtgacaaaaaagaaacaggtgacaaacaaatttgtgcatgtgtaccgtcttcggccatccattcggtcaggtcttcgctgcggttaagcacccccttttgtccgtacacgctgcacacttttacgccctctaaatcgtcggtggacgtgagcactgtagtttttaaaactaacgcgtcgccagtcagcacgatgctagcgcttagcgactctattttttggttacgagtttgccgaaaaaacacatacacaaaatacaggttaaaagcgccgtttgtacgcgtttcaatcatgcaccgtttgttgtcagcccacgaaaccttaacgttgctcaacaacacgcccgcaaaatacacaatcatattatcgggcaacaaaacgtgattgtgttccttgttttcaataaagtttattattggcggcgttttgccaacaagcgttaattttgcctttagcttgtttatcttgttgttgtacatgcgtattggcaacgccatgtgtggaatgtacggatcttcggcggtcatgagtttagaatcgcgcaccaaagtccacagtttaaccattttgttgttcattaacacagtgtcactgaccgccactgacaagcccacgggcaacgcggcatttcccagcttgttgtaactcaacactggcattgcattttttaaattggtcagcgctactatcattttaggcaccggtattgtgtaaaataagtgcgtgtagtcggtaaagtaatactgttcaagttttgacatgagacacagcacgtcatcattttcttcaatttgacacccgttcatagccgggtcgtgaaacagcgagtttttgtaatgatactcgtagggcgtaagcaacgcgttgaccgtagcgttgaccgcaccaaatatgcgcagccgtttcgccacacataccataccttcgtgatggttaacgtacaaaatgctttgcgacatttttagctcgatggggcagcggtgacgtttaaaagcgtaaactatttcgggcacgttggcccggcggcattttaaattggtgggtctgtcgttgaacgcaataagcaacgtggaggtgtcgcaatgagcaatgtcatgcaccgtactgaccaggttcgattgcaacagttgggtaaacttgttggctaccatgtcgtaatcaacgctaggcaggcgcgcgttgcggcacaaaaaaaattttttgcccgccacggtcatttcgccgtgaaagaaactgccgataaacttgacaaaatcctttttttgctttagcattttttggcgcacgctgtcgttggtgatgcgtgtcacttcgctgcccacacgatacttgagcaccggcaatgcgatctcaatgttgttgttgctgcaattgtcgtgttggctaaaaaatgagcgtcgctgtttgctaaacgtttttgatacgcaataaattaaccggccgttgaccacgctgtccactatttttttagactctttgttgtacaagacggcttgcgttttgcgccgttttgccggcggagcttcacaatcttccgcacggttttgataattttgcaacaccatcgatgtcagcagcaattccattaaatacgcatgcttgtaaattattttgtttgccaagttgtctatagaatagcaaatgtcgtggttcattatcattttaatgtgtttaaccaactgttgtttgtgcgttttgctgtatatgaacaaaaaatcaagcgggcgccatttgccgctggtggccaaatatgtctccagcaccgcgtttaagtcgttggttaccacgtaatcgctggcgtacacgtcgcgcgcaaaaagtgcgtcattttgtttgtcgtataccaattggatggcgcgattaatatgtttttcaacgtccacgttaccgtacaaaaacatgcgtttgcaatgcttggcgtatagtttgtcataaaaattgtgtatcaacacgttgttattcatcatgatattgggaaaactcaaaaaacgaccgtcgagcataaacgtgcccgccacgttgttttgcgcgtcaaactcgacatcgattgtgcgcaactgtttgtcaagcgtggtgccaaacaccaccaccacgcatttgtgaagcacgcaattgcgtcgattattaagagcgcagcacatgtacgatcggcgttcttgtatcgctgccaggctaagcggcgccgcactttccggtgaacaacattcttgtacaaaagtcaatccatacgccgactccaatttagcgtataacgcgttaaaatcttgcacgacgtccgtcatattccccggcacgtggcatactgccgacaatggcgtccaacacgcgtgcagccaaacgccgcgccacggaagaaagtgagtttagcgcacgtcttaaacaaaataaaacatgcaacttgtccgacgaagagtttcttggatattgtcgcctcgaagagattgattattacgaaacgcttaaattaaatttcgaatccgctccattttttgatgaaaattttgtgttacttgttatccgaatggccaacgtggttacaaaacaaattagaaaatatcgcaatttaaccgacacgcaccataacaatttggtacataatgtgctcatcataatcgaacacgcgcgcaacgtgcttacgcatcaaaacaaaaaagagaggtacgacaaaattgttgcagctaaaaatacaaacgtattaaaactttgcgagacgtacatgaaaaggctcaaacaaacagacaaagaactaagtgaagcaaaaaataattttgtaaatcaattaaaggcgtttaatttgccgttagctaaaacaaagttgtctagcgcggtaagcgagcaattgcaaaaatggttgcaattacaacctgtagtggcaaaacgaccgaccaccatgaatcgcatacttgtaaaatggaatttgtttcccaatcaattaaattataacaaacatgaaattgagcaagaattgcgtaattattttaaaaattatggaagtattgtcaacgtgtatgtatgcgatattgaaactagcagcgctataattgaatatgccacaatgaaagcgcagcgtagagcgattaaagaaaatgaatcatccaaaattcattatactgtcaccgaatacatgctgaccgaattttacaattcgcaattgcgcgccaagttgcgcgacaaattaaacagcattgagttacagctaaatgacttacagcttaatttacaatctatacaaaccagataggcggctaaaaactttgtataatctgatatctttgtaaagattcaatttaattaaaggtttttgttaaaaataaattgcttgtttaatacgacgcttcaacaatttatttgaaataggatatatttatatgcgtaaacaatttgggttgtggcaatgacgcattatacctatttgttacacacttttattgaaaaaatgtcaagagtgacacttaaacgcaatactttcgcaatttgttatcattgataagtgacactcaaacagtttgtttgtcggctgcgtagaatataagggtctcattatatatgttaaaggcgcgcgtgccattatgcttctcaccgtacatctcaaagacaggcattattatttgtacaaattgtttaaggaaatttggccaacatgcacaacagaatgtcgaatatgtttagatactttgggcgcagacggcggtgtggtaggcgtgcctgacaacggaatgcttaacttggacaaaatgtttcacgccgagtgcattgaacgctggaaacgcgaacgcaatcgcgatccttttaatcgcgccattaaatattattttgcgttccctccaccaacgttgcacgaatgcaaaacgctgctggagcacacgcgcgggttcattggcgacgacgagattgattgcgtgtacaaaacggtgcatcaacgcgttaccaccgaagatgcgctcgacgtagaactcaactttgcgcgttattttaaacatggcgcacgcgctgtccgcggcggacgttgacctgattgcgtatgtactaagggacaatttgtttttggtaaacaataattatattatttgcaatgtgttcgaccaaggctccgatcgcgttgaacccgtgtgcctcggtgaaattggtgccgtacaagcccatacgcccgaccaagatgcaatgctggatacatcctcgacgagcgacgtgccgagctcgacgacttcgtaacgtttatcatgatgaacgtaacgaaagcggtatgttacacgcaaccgtgtatagcgacatttttctcgacgaacgaggcaaaccctattataggaaaatgttgcgaaaacgctctgacgccgccacggcgcgccacgcgtttgtgaacgctggcgaggtgcacgattgcatattgattgaaccggcgcctagcgaacgttttaaatctatagaagaagcgggcgaaaccaacatgaccacgctcaaaattattataaacacgctagttgacgcgttgggacatgtggcgtctaatgaatacatccttgtggcggaccgcttgtttatcgacatggtgtattccgaatttcgcgctatagtgttgcctcagcacgcgtacattttaaaacaagcgtgcccggcgcaaacagacaacgaaagcagcgacgacgacgaacgctgcgttcgacgcgtagaaccgccgtggaaccagatcgtggagttggccagcgtcgcgtccgccgacaaggacggcgacgcacgctacaacgaatggcaacggcaatcgcaatatatttatcgcagctttttagtgtacgtgaccatgctcacggttattttaaaacaaagcaatccatttattattagcgaaaatagttccgtgtcggtgatattgcgcagtctgggcaaatgccccgacaacccggagcgcgtcaaatgttgcaagttgaactttggtggtgcgccgccgggacacgtcatgtgtccgcctcgcgcaatcgtcaagaaaatttatagctacgccaactgggcgttgaacccgcaaaaagaccggcggtatagcgcgctaattgctcggccgcccgaatcggcaacaggtggcaaatctaaagatttacgagaaaacattaacaacgatttgcatgccgatgacattacaccgctcaacttgttggactgggacaactttgttggtgggtacatggactactttggcgcgacgccaagcgcgcaatcgacgggtatttaacggctgacctatttgttgaacaaacattgtgttatctcggttgattagcgagtggtcgcaaacatgaaaaaagtgtcattaggaaaaattatagaaagcaccgtagaggacaagtacaaataccatttcaacaccgaccgatcgccaagcaagttgactttgggagaattttacaaaacttttgaagccaatcgcgttgggcagcacactacgtacaacgtcgtgggcaaaagggattatagctacatcgataagctgactaaaaagtgctaacatgtttcaagctttaaaacgacgttttaaaaaacaaaaaagcgaccaaaaccacgagcaagacgtagttttgtgtcccaggtgttatttcgtggcgcccggctacatttccgtcgcagaatacacaagaatgcacataaaatttaatgaacaatttgtagataaatgtttgaacaatctggcattagagcaacccaaaacttgggcaaattgttcagtttgtcccgccctctactaccccttgtgttaataaagtaaatttacaaatatttgtggttttctttacaatattaaactgttatacaaatatgtgttttgtcaccaacaaaataaagtcgcatttccaatgcaaaaattatttgtgaaattatataaatacaattctcacgcagacgcgctgtttattatgttccgaattcactcagtcgagtagacgtacacgatgttacacccgattgtcgcaagacgtctagagtttgataacgtaatattggatctcaatcatgtcgcgtttaacaccgaccacaacaaaaacaatgaaaattatattgtgtttttgaacgtgaaacgcgcgttttacaaaaacttttatctcacttgcgacatgtctttggaaacgctcgcattgtacgtgtacgaaaacacatccgtaattgtcaacggaactcaagtgcctcgatctcgagattttgtgaaacacattgcgtttaacgcatcggaccgcgaccaatctatggtggttgattttactccggaagcaagaatcgtaatagcgcgtaagctgcgcgctgacgaacgctactaccagcgcgccagtgggtttgccgactttcagcgacggcacgagcagccgcccgcgcctgttgaacgcgacttgcacgtgcgaaacgccgcggatcgcgagttggaaataaaactgtttaatatgtgaaaagtgtaaatttattaataatcatcttcatcgctatgtgattcgacgctactatagtgcggttgagatttattgttataatggttgttattaagaattttgcccttgacgcgtttttttcttgacgcctttgtgcgcacggttttccccgtgctaacaagtttgtcgtcggtttcgtaagcgctgctggcttcgctatcgctgctggtgctggacgcgtgggtgttttttcttttgtgtttctgcaacgacgacgcatcaagttgctgacgttgcacaccgtcactgtcatctgacatgtcgtcacgtataatttcgtatgcggctcggcgaggaatccactgcaagtcgttgacgcgcacgtagcgttcttcgagagcgttgcgagctttctgcatggctaagtcttcgtcgcccgcgtttagtttgtggtgttttgagaacgtgtcaacaaacagctgcttagcgcgtcgcggcattttttcttcgtaaagagcgtcgggaatgtgatacattgtcgttgttcaattcaatgtcgctgccgctgccgctgctgctactacaggaagaagaactgctagttgtgtctgagtcgttagcgtcgggtcgagcttgccatcggccgtcaattaacatgtactttttcctgacagcgcagacggctagttttgtagcaatttccgcagaattaaacttttgtaaactgcggtcgtagaatttgttaaatatcctcttaccgttatacggcaaattgtgtaaactgtctggtaacatgttaataaaaaactatttatatctttaaaaatgacttttatttattccaaggacggatgggtggcaagaataacacacaaccatgagattcaacttgatcacttaatttagcttaaatttaaataatattttgcaacatgttagattcaaacacgtcgcccgccttgtcggcgtcacacgaaaaaaagttgttggcttttaaaaattcaatgtgttgttcatttttgacaataaacacgcggcttttctcgtcgcggcgtaccatgacgccgtgcttgcacagcgatatgtacttgtagacaggcaaaagtgcgtcacgagcctttttcagcaacaatttatgctcggccggcgcggccacaaatatctttacgggcccgtcgtaatcaatgtctaggctgtaatttttaaggcgctgttcgcgcgatttgctctgccactcgcgggcgcgcgacgcgtcgcacaacttgaccaccatgtggtttttgtgaaacgacgaatcgagcacgtgcttaaactctaaatcgagtaatgcgcaaatttttttcaaataaaatgttctaattcttttgctagtcagtcgttgatcgtgaataccataaatttccacgctattgtttaaccggtctcgctccaactgtttaagcttcacgttcattagtttgatgtcattggactcgtcaatttgcgagttaattaaagacttgagtagcgacacgttgatgagctgttcgaaccggtccatggcgacgacacaataattacaaaccctcttatagtagcgggcggcgaagccacgcgcacgcgttgtcatgatttcgtttttggacaagcccgcgaccgagtttgatttaattttggaccctactaaacttgaaaatgtggcttttttttctaatcaagaatttaaaattgttttaaaaaatctcattgctgacctcaaaagaaaccaaaaacccaactatttcaacagtctcatggatcaaatgatcaacgtgtacaccaacgtgggcggcggcgccaacgcgaatgctctcgtaaaaatcatcgacgccacctgcgtcattatcactgacctaccgtccaacgtgtttttgaaaaagttaaaaaccaacaagtttaccgactctatcgattacctcattttgccaaactttattttgtgggattacaactttataattttcttaaacaacacgttcaattccaagaacgaaaacagttttgtggacatttcgggcgcgttgcaaaaaatcaagttgacgcacggcgtcattaaggaccagctgcaaagtaaaaacggctacgcggtgcagtattcttactcgacgtttctcaacaccgcctctttttacgccaacgtgcaatgtttaaatggcgccaacgaggtcatgccgccgctgcacagcgtgcgccgctattttggacgcgacgtgcaacacgctcgagcgtggaccacgcgtcatcccaacattagccagcttagcacgcaagtgtcggacgtgcgcatcaacaagtgcgacaccgattggaatgtaaaagtgggtcttggcatatttccgggcgccaacaccgattgcgatggcgacaaaaaaattattacgtttttgccacaacccaactcgctcatcgacgccgagtgcctgttgtatggcgatccgcggtacagttttatttgctttgacaaaaaccgtctcacgtttgtgtctcagcaaattttctacttgtaccaaaacatggacgcaatagaaaaacttttaaaaaccatgccgctggcgcacatgctgtggcacatgcacgccgacgtcaagttttctacgcgcctcgaactgctgttgcgagatttttgccttgtggccagctctaacgccagttatttgttgttcaaactactcacagagatgataaaaaatgaagaaatggtgtgcggcgacgaagagctgtttgggttggccggtcagtttacggccatggtggaaagcggcgcaaaaggcagcgccaacttgattgaaagcactcgccagtacgcgcgcacgcaacctacagacattgaaacggtttcaactagggcaacgaccagtttaaacagctacatatcgtcgcacaacaaggtgcaagtgtgcggcgcagacatttaccacaatacggccgtgctgcaaaatctgtacattaaagacaacgccatttgctacaaaaacgattttagacagctggctagcatttgcgctttaccatcagattatttgtttcccgaacatttgttggacttgtttatagatgaataaaacacaatattatttaatacatttgtttatttattaaattaacgttgcatattattagctaaacgcgcaatttgtcgctccgtcatggacgcctgcaccgcttcgacaagctgctctttggttaaattgtctaacagcgtaattttgttgtgtttcgccttaaacttgtctcgcggcagcgattctttaaccttgttgagcacattcatagagttgggcacgtaatcgctgcgaaacacaatgtctcgctcgcctacggacaacctatttagactgcgctgaagactgcgccgttgaggtcgtacaaacgcaaactgatcaccgcctaaatcacacaccgccagcgaatgaagcaattgtgggtttgccggcttagtaactacgtcttgaacaatgtccgccatgcggttggctagtttgtccgagcgctcggtggcggcgatcagcgcttgcgtcaatatctgcgtttgcgccatcagcgcgttgttacgctcgttggccgcaattaaacctttactaatttcaactatatttgcatttgcttgcgccaagtccgcgttggatttaattaaagccgttgacaacgtttcgtctgtttccatcttgatggctggcgcgtacttgccagtgcaaagcacttgcggaatcacctcttccaacaaccaagcttgcaactccacggcgtacggcagcttgctcttcatgatgagttgtatgacgccttctttagtgattagaactgtgctagggtgtaaatacagcgggtcgccttgttttaccgcgctgttttcagcaaggggggcgaattggcgctcttgatcaaacgcacatttatacttgtcgtcgacgtgatcctttacagcctttttagtatcttgataatttaatttgtcagcaatatctttggccacaaactttaaaacattgtcattgttaaacatgtaccgcagcgtgaacgtgtcctcgccgaatttaaattgaccaatttttacttgggccattttatttgataaacacacgttgttgcttaacgaccgcaaacgacacaatgacgcgcaatgctttcgcaaacggaagggtcaatgttccattaattgcgcatgccattgtaacacttgtaataatgattgtgttcatgatggtgaccgtgtctgtaattgtaatggtaattgtatttgtgggccttttgccattgatttttaccggcttgcgaacaacacaaataaaaaccattttcatcaacaagtttgttttattttacattatacaaacaaaattttttattttactttatacaaacaaaatttgaacgtgttgtttgcgcacttggcttcgggcgggccgtcgtcatcttcttcgctgtcctccgtgtcacttggcgctttgcgtttcaacccgcacgccaccggtgttttacgctttttgcagttttcctcatttttgttgtcttgcgctttgcgtttgcacgcaattggaactaataaagcgcgttttttgtcgtacatttggttttgcatgtattttgcaagaataacctcgtaacattcggaaatcaaatttttgtgctcgtcaccaaaaatttctaacaattcgttcataaacgtatttaaaatggtcatgtgtttaagccaactaatgcgtttcgtatttatatcaaacaaccgcaaagggtaacttttttcagtggttttaccttcaatgtcaagcaacacgtacggaatgcggtcgccgttgcccggcacaaagtccgtgcctttactgattaggatttcgcgacaatgacgcgcggcggtaactacgcggcgtttggccaatgtaggtgcttcgtccgcttcattggcgcgccgtttgtttgctttgccagcgttgtcattgtacgtcatgctaaaactgtaatcggtcaaaggtttttcgccgccaaacgcgtcaaaatacatgagcatgtcgttttgcaaactgtttaaacatccgcgcaaatcctggcggcgcaacacgtgctccatggctgacctaaacgatacacgcatgaacactggcatgtccttcttgaccaaccatcctttaaacacaattttaccgttgttgttaatgtaacaatatttcttcttttttaacaacacaagtacgctcatcaggttttcaaacgccattttgtaaccgttggtgaattgggcattgacgcgcgcttccacagccgtgcatatgcgtgttagcgtggccatgcgttgttcttcaagaatctcgtcgcgattaaacgtgggcaacacaaacgtcgaatccgtgtcgccgtaaagcaccttgaatttgagcgtggtcaaaccaaactcgcgcagcaactcggggtcgtcggataagccctcgattatgccgatggccgcggtcagtttttcgcggcccaccctcgtaatgtagttggccaacgctttacagaaaatgccgtaatagccgtaaatactgttggcagtgcgcttgctcaggttttgcatttggtcatacaagtcgtacaaaaactcagactcaacttgattatcacggcatttctttagatcgctacgctgtttaagcagtttgagtaacagcttgacgtttatcgcttctttgtcttggttaaggtacacgttgccgtcttcgcacaaaattaagtttgtgagacaagcgcaaatgtcaatcatgatagtgaggtacagcgagttaaagtctaacgaaaacgcatactcgtacacgccggcacggggctgtagcaccttgccgccttcatatttgaccgtttcagcgatggcgcccaaacaaatagcgttggcgggcacgtctttaaacggcgtaagcttgcgttgcagacgcgacatgcccgcgttgccagacatgagacctaaatcgtttttgtcaaaaaaatatagatccggtttgtcgagcccggtagacgggtttgtgcgcgtgttggtcagcgccaggtgaaaaaacgtggtgctaatcaaatgcgaaatgttgcagataaaatcgtcggtgcacaagcgatacattaaacattgcgagtacatgaaatcgtttagttttaattttaaaaacaatttaatcggcaacaagcaatcctgcacgttgtattcaatgatggtgcccagctgcttgttgttgtacatgcgcaccattgtttgccaatccaaatcgaccttggcatcgcccaaatagtatttactgagcgtgttcaattgaaagttttccacgtcgcgattgttagcgtctacgccaaaatatttgtacaggtcaatgtgaatgtaataattaaaataatacgtgtccgttttgttaccaatcttggtgataaacaacttggtgttggactgcaaagggggcaaatcgtagcggcgcaacgttggtttattaccattcaagcgcgcccgtatgtacggcaaatcaaacacgtcgccgttgtagtcgagaatcacgtcggggttaacaaactttaaaaaatccaaaaaagacaatatcatgtcagtttcgttacgaaacacgaccacgtgcgtgtcgtcgtttgtgtgaggaatttccaaaagttctttgtgatacacaaaacagattttgtcaaagtgatcgtctttgtatatcgacaacccaatgcacatgatgacgtccacgtcgggtttggaactgttgtgtccgtccgaatgtgtttcaatgtcgtagcacgccatcacgggcgcaatattagtactcagcgtggccgggtcgacgatttcaaaatccgcatcaaacttttcaaacgtaaacgggtgcgtgtcgtcgctgacgcagttgttgcggcatctttgcgcgcggcggaagcgcatgtacgtgccttcgatcacgggcgtttgcatgtgcaccctgttggcgttgcttaaaaacttgtccaaagcattagatttttcttcgtacgaactgccgttgcgtttaaacttgattacgttgatcttgtccatgtgcacaccttttacgcccggcgctacaaacgtgttatagttggagcagcgattgcgacacgtggaaaatatgtgattgttgtagcattttttgtacgaatacaagtccatttttattacaaaataaaattgtaacacacgaccatttatgttaatgttgcaaaacgccaacagcttgcccttgttttcgtcgtagtgaatgcgcatgacgcgaaacgcgttatcacacgatacattgtaagtgtgcggacagtaatcgcaaaacgccttttttaactgattgtaagtgtggattttcattttagcaaaatgcaaaaatacggagccaccgatgttagcacgcgcactgttcacgatctactgactactatcaacactatgagtttgcgcataaaatcgctggagcggtatgagcacgcgttgcgtgagattcacaaagttataataatgatgcgtccgggttttaacttgcaactgatggatcttaacgccatgcccgcgcttattgtgcagtttttttccgacatgacaggccgcgacatgacaggccgcgacattacgcacaacatcaactacaagtacgactacaactttaacggcgcgctgccgtttcaaacgcctccgccgcaaccgttttacggtgaacatgggcttaaacaaccgccgcctcagccaccatttcaaccgccgccgcctcagccaccatttcaaccgccgcctcagccaccatttcaaccgccgcctcagccaccatttcaaccgccgcctcaacaaccgcctcagccaccactccaacaaccgcctcagccaccactccaacaaccgtcgcctcagccattaccgcagcaaactccttgtcaaacaattgtgcctcaaatagagctcaccgttgacgaaatgcgcgaccttcaaaatgtatatcaaaacatgcagcagcaaaccattacctgggaccatttaggtgcattaatgacgactatgattcgtattatgcaagtgcgcgttgtaaacagcgtgacaatagtcaacgctataaattcccttaaaaatgttaccatgttgaccaattttgattttaatgattttttgcaatgcgtcgcaagagaaactgcttttcaatttactatttcgccagacctgtgtcgcattatagtggcgtttattcaattttttcaaaacacatactcttccataacattaacattgtttaaatacgtaaacttggacgatttaattgtgtctacaaactcaatgcacgtcattattgtacaactatatgaattttatactaaaatctatttttttgtaatgcaaacaagctttgtctacaccaattctgatagttttgttgaaacaaccgcaatgctatataacagaattgaagcgttaacagcatccgcgcaatccaccaccattgtgtcaggtttgcaagaaaaattgcgcgaagaaagaagtaaaaacaatattttggatagggataaaaacaacgcgttaaaaaatgcgtctgatttagaagatcgctacaaaaatttactaactgaaaatagaaatttaaaaacagaaaatgaaagattgacacttttagaaaatgaatcacaaagtttgtcgcgagataatgatgagttgttaagtgaaaacaaccgtttaaaagaagctaatacagaacttttaaaacgatctagtcaaaattataaaaattttaaaaatgaacaaattaaagttaaagcagaacaagaaaaaattcaagatttagaaaagcgtttacaagacgccgaagatatgcaagtacaaaacgtaaacgatgacgcacaaaacattattaccgaattaaaacgttctctaaaagaaaaagaaaacgaattgcaagaagttcaaacgttgcattccaacaagttaacttatgttcaatctcaaattgatttagacgcaattgcgtacagggaaaaattggcatctatggaacaagagtttaccaaaacaattaatgaacgcaatgacactataaaacaattaaacgaaacattaacggcaggcaatttacaaaattacgaattagctgcgcaactgaaagaggctaaacaagaattgtctgactcaaaacaaaacattattgaacaattaaaagtaggtgttaaaaaaagtaaatttggcgataacgacgacgaaataatagaatttgcccttaacgctttagatgtaatgtataaaaaagtgaaacaaattgatccaaatttgggcaatttattacaagattctaataatataaatcctcaactgtcggtacaacaacgcgacgcgttaaacaattggcttgacaatttaagtcaaatcatgacggccaacgacatactaaacttaaacgcagttatcaacatggctggtgtaaaaaatcaaattgcacatattattccggccaacatgttaagggattccgctggcaatttattgcccgctcaccaaatacaaaacgctgacaatgttgttttgattagtgccgtaagtatgttggtttctgaatacaataggttggccggtgaaatatctactttgaccgcaactagtgccgcacaaagcgaagctagcgcgttaatcgccaattgctcgcagcagattgctgctctacaagaagagttaagaaaaaacaaagaagactttgaaaaaattaacaatttggtacaaacgtcttcgcctcaacttaacgacaaaaccatacaattaatgaaaacagaattggacactaccaaaagtcaattaaataatttaaaaaaaattactaatgaacaattaaaacaaatggcagacaatggtgtgcaagtagaaatgagcaaattaaacacacaaattgacgaaataaattctttattgttaaattcacgtacagttacacaagatatattagactggaaaacaaacatgatggaattgtacgaatcattggcgcgctcaacagccgaaatggaaactatataaaactatattcgttcatatcttcgtcgtatttaagcaaacctaacatgttcatgttgtttgtttccgcgttgtctacggtcacataaataatggctttggtcaagttgtccgacaaacacgttgacaactgatcaaaatccatagaaagtttttgcattacgttattttctgtttcatctttgccgtcttgtttgttgttgttatccaaataataaacacatttgttccatttgggttcgtcagaatcattgcaatcaatcgctttaaattgaactgaaaaactttctttgccattgtcattttcctttggatcagccttaaactgcgacagctttatacacatcaagtgtttgttcgaacggctaatgttattggtggcattactatattgtaaatttagataatcatcgttgtccgtgttggtgggcgtttccaatcgtgtcatttggcctgccacccaatttaaaaatgcgttagttcctttgactgtgtgctgacatttaactccgtacacattaaaaagtttaccagaatttttaaaataaaattccattaattggtcaaaatcttcgcaattttgcacgtgccctttggccacgctggccaacacttttgcgttggcaaaacattcaacttgctccacgcgcacggcgccgctcgcgtctgccatgttaatttcaaacaccattttataattgtttgcgtttaaccgtttaaatacacattttagcttggccaacacgttcactacgctttcatcttcaaaattagtgtgcgtcaaacttaattgtacttgatcagcagtattttctatgggcgtatcacatttgacatattcgttaatttgaatccactctttaaacttggtcttgataaaatttaagctaatgtcgtagcaatcgccgtccaccaattctttaaaacactgcaagttgccgtagtacgcttccattttgttgtcaatcaaaaatctaaacgtgtaataacgttgattatctatgctcaaagttgttttgtttaataacttgcctgtgacgcgtttataattttcttttacttttttctttagcggctcgttgcttgccgtttcgtttgtgtgctcacgtttggtggccattatgtgggacacggtgcgttggcaagtgttaagttccaatgaagtagaagtggcgcctgaacaccgcgcgttggcttggcgtgagttgattgcaaacgtggccgacgacaccccgctcgattacacgtttagaacaatgtttcaacgagcagattttgagaattttgattacaacacaccaatcgtgtacaatgttaaaaataaagaattgatggtgctaaacgaaagaataagagccgcgctcaatagacccttccgacgcagcgaccgcacgattaatgtgaacacagtgcacgtttttttgctttttattctagtcgtgctgctgacggtggtagtcgcgttttggggacgtgatgccgcaccgcgcaatgttgcaacggaaactcgaaaaacttaaacaccgtttaactttgttcagcgacgcccaaattaaacgtgcacgtgctcgcctatttgacgacgcgctaacccgtcgaccgcgatgttggcgcaagctggccgagattgacaaacaatttaaagtgtgccaaaacgtcaacacggcacttgacttgtgtggtggaccgggcgagtttgccgactacattatgtcgtgcaacgcgtcgtgtcgcttgtacggcgtcacgttggccacaaacgcgccgtacaaacgccgagtgcgcaaccaaaccaatttttgcgccgttatcggacccgacgcgacgggcgacgtgctcgacaaaaatgttctgtttgacttgagcgtaaagtgcggcaacgcgtgcgacctcgtgcttgccgacggcgctgtagacgtgaccggacgcgaaaacgatcaagaacgactcaacgcgccactcatcatgcgcgaaacgcaattggcgctcatttgtttgcgcccgggcggcaattgtgttatcaaggtttttgacgcgtttgacgacgaaacgctaaacatgttggcaaattttgtttgccactttgcgcgttggcgtttggtcaaaccgccttcatcgcggccttccaactcggaacgttacttggtgtgcctcaacaagttggtggtttcgcaagcgataggcgatcaagttttcgtcatggcacgcgcgtttaaaaaattttgcatgttgcaatgcaagtatttaaacaaattgttgtgtgagttgcaaaaaattaagcatggatttgaaaaagtttaattttctaatattgtccacgcacgggcgcgtcaaaacgatgacgcccttgttgttagacaacgttcaaaaaatggatttggctaaaacgggtttcttttttcacaacaacatgctcaagtgtatcggttgccgcacaaccatggacaagattgacaccaaacgcgttaaacgacacacgtattctgattattgcatttcggccaccaacgcgttgctggccaacgaaagtttacgcaaacaatcgttttgtagttttaaatgggcgcgacggcaattcgcgtcgcagcccagggtaattgacatgttgagtaggcgcggtttttattgttttggcaaacgacttcgttgcgccggctgcaaagccgtcgtcgcgtacgagtcggtggacgccgcgcaacgaggccacgacgccgtttgcgcgtttcgtcacgtggtcgacgttaacctggatgaatccacgtttaaagtgttgcaggcagatttgtccccgccgcgtttagaacgcgtcgagcccagcgcgccgcaagcagacagcagcagcagcagcattgtatccgaatgcaaagtgtgtttttcaaacgaaaaatcagtgtgttttttaccgtgccggcatttggccgtgtgcgctacatgctctccgcgctgcaaaaagtgctgcgtgtgcaacggcaagattaccagccgcatagaaacgcttccacaataaaaataagtctatataattttttgtattgtatgcctaatagtttattctgtaaattaaaatttgttaaacaggtgtcaaaaaccttttttactttgttgtgtaagtgtgtaatttgtttaaaacctgaagatacaacaagtggtagttatttacacattaacaacaattgtaattttatttatataaatgtggtaaacagtaattaaacaaaattgtaaattatatatttttttattgtaatcaaatcaataaatataattaaacaatgtctaatgttttgttttaaagggtttaaattttcctgttgtggatcaaattgcaaaacgtttgctacagctaataaattatacaaatcagtttccatggttgataaagcatccaacgttgcgttgctatcgctgagaagcgcttgaatttcatgtacttttgcaagtgcgtcttcttgcacgacgtttaatgtggcttgaggcgtcgtcattgtggtggtttaaaactcaatgtgcaacaattaaacgttgacacaatgcaatttggcttaacatagccgcaactcgtatcgtatttaacagcgtcatcgctcaattcgttgtttaaaacgtttattatcgcatttttaaaagtgtttgactgcgttattgtgactgttgcttgcaattgttcttctaaaatcttgtaaatgttgtctctaaacgctttgtcggtggccaattgcgcggcgttagcttccagccacagcttgaacggttcgtccacaaacaaaccgcgcataatctcgtacaattggcggcccaacgaatatacttcgtcataatctttcatgttcaattgcttgcttaatgtcattacagaaaagtccacaatcgcttgcagctgcttgtaatattccacataggcgggtttaagttttaacccgtccaccgtatattcttccgcggcaccgtgcacaattttctggtcgggtcgcgcatctttcacggtagttgaaatgggattttcgcagctagtcattgttgttaatagatcttattataattggtacacttcgttcatttgcgttaccaaaaaattggatagcgcactaatgtcttcgcccgacaatctgtagccgtccacaaacgtttgcacaacgctcacaatcttgcggttcgtcagaaacgcgcacactaaataatcaatttgtttttcggttaattttttggacgaatccaccgtgcccaccaagttgtaaatgagccgcctgtcaatttggtgggcgataaacattttgaacacgttgcgcagtttgtcaaaaaagtgcgggtccgggtacacttgctcgttaagccaattgtcaagagtagagcgcaccatgctcactttggttgcaaacgtggtggatttgactaattcggcaaaaaaacttttcatcatgttggtcatggttgtttcagtcaagcgagctggtatttttgtttaaaattgcgtcaagcgcttgttcaatttccaacttttttcgcacgctcttagctttatggctgggcaggtcgtccacggccgactcggtatttttacttattagggccggactgaccagcacaaacactagcaccagaatgagcaaataaaacgcaataccgttttccttcttgtcgtacaccaggctgaacacggccagcgcgcccagtaacaagtacagattcattttgcccttattattcaccggcacgatagtatagggatgccgaaccaccagacgagcctgcagacgagtcgcggttgttcaactctgattcctcgtcgctgctgctgctttcgtcaaaattgtacttgttcaaatacggtttggtactggccggcgattcgtggttcatcaagcgcgccaccttttgcaacggcacgccgctgttgtacaaattgctgctcaaatagtgtcttatcatgttgctacgtggccgttccatttctacgcccgcttcgtccagcaaacggcgaaagtctttaaaaggcgtggaagtgtttttagagatttgcaacacggtggggttgcgcgcgtaaatttcacgagccagctccaacggtttggttttgatcgtgttgagcgtgttgttgcggctgcgtttgcgttttaaattgatagtgttgctgcgcagtttgccttttttaattagcacgttaagatcttccacgctgagctggcgcgcctcgttgatgcgcatgcccgtacctaacattatgcaaaacactatggcgcctcgaataaggccgcggtcgtgcacgtaatcgccgtttaacatttttattttggaattaataaaatccaaaattgtgtctattgcgtttttgagcataaaatttttttctttttctcgaatggttttaagttccttgtcacgtggcaacatgaccatgcgcgggattttaaattcggccaaacccatagcgtttgtgtaaaagttaatggtaagctgcaacgtttccttggtcacagacctcaattcaagcatgcgtttgcacagttctttggggttcacaagcaaccgttgatattcaatcgaatcaaattccctgtttaacgaatatgcggtgttttgcaaatccggttcctctattaggctaaaaataattttaataaaacgtgacttgtaactttttagtgtggtgggcgcaaacggtttgggaaacatgtacttgctccacaggctgtcgttttttacttcgtccggcgtgcaccgctgtcggtcggtggccaaatcaaacacgtgctcaaattgtggcgctgattgaatgcgcattttccaatcgttaaaaacattttcgttgcgtgcgttcaacagctcgttcattgtaattaatcaaatttattaaacaaaaaagaaggatcgctgttgtcaattgtgtcggaagaatattgcggctcttctcttaatattacaaaataatagataacatacaatagcagaaacaaagccacaaacgccaccagactaatcagcacaattaaaccggccgacatttgacccgtgcgcgtttcgcctttgtgtacgtccgagtattcgtacacagcagtgtcgtcgttgttgttgttgacgggcgcatcgtcgtttagcgctagttttagcggaatgtattctacgcgctcgtggttgcccaaacggtagtagggcacgtccaagttcatgatgacaaatattgatgcaaatgttgaggttgcgctttaattaattgcaatttaaaatatttcccgcgtttacgcttaagattgtattccaattgcgcggcggtcttgtaatcgtacgcgtttgcgctgcaataaagtaaacgcaaagagtttgcattgcgtaaaaaacgcgcaccaacgccgcgtttgtgttggttcaaacgacgtcgcaaatcgctggtgatgcccgtgtacagtttgccgtcgtctcgccgcacaatgtacacgcaccacactttgttcttgtacaaactcatattgcgcgcgaacgcggcggattcagtaatctgtcggcgtcagtttgcttgacaatcatgaatatgaaccgggttagcgtttcacactgcgccgctaattgagacaaactcttttggcacgcgctctgcgtcaaatgggcggccggcgagttgatggcgttggcggccgacgtaagaaacgccgcgttctcaaacatgtcgggacgtttgccgtgtcgcgtagcaagttgcgacatgtaattaaaaatgtccgcggacgcggacaatggtgccaaaaatcccacgttttccttgagccctacgacgcgcgcgcgattcttttcgttgagcacgtaataataatagttgccgccgccagcaaacaaatcgtcaatcactgaatttatgaggtcattgatcatgttaatgtgcacaaagctgcgcgacttgacggcttcttgcacgttgtcaggtagcgtggcgcgttttaaaagtagtgtcacataattgttggcaagctgctggtcaaacggcaacgggatgggaatactgcacgtgaccgcttccgacaccatgtactgcacggccaaactaagctgtttggccgcctcgttgagcgcgtctttgccaagcgtgtctgcgccgccgttgtaaaatttttgcgcgtacgccggcagcgaattgagtacaaacgaaggctgaaaaatgttggaatccgaatcgatggactctgccacgctattctgacgcagttctttttgcaacccaattaggtggcgaacaatttcttcgtcagtttgcacgcgcttgattatgtttacactaacagggttgctgtcaatgcacatgtcgcgtattgtgttgataaaatgaatcattaaaggagtcaattcagacatgtcgttacagcgataatagcgaataattttatgtacatagtctgtgcacttgttgtaccaaatagattcgccgctggcgtcttctttggttttaacaagcgagtttgcgctgccgcgatctgtccgctgcaccattgtggacattgtggttggataattaccgctttgcgaactagtaacggtcgcgctggtgggtgcaaacgggtgtctcgcaggcgcctgcgaaacgttcaaataaaagccgtcccgttcattcatggttttttaatgcgttcttatgattgcaaaatacaacgtatggattacttataatataattgttgttacaaaacaacgctactaaaagtaacaaaatgacaagcaaatttaatatcgaaaatttttccacgttaaacagcagcaacagaatggcgcatcccagcaaaagcgtttgaaaactgacacgttgacacaggatactttcgcaattgcgaaacgctacgttgaagccgttttctcctttgatgtatctgcgcaattccgctttgcagcattcatcgcacataatgtgcacctttataatgagcccgtcggtgtgtaccgtttgaaaggtgcgaggctgactgccggggtggaattcaaactcgtaaccgcttgaagtagaaatttgcgcaaaataatgtgccaaaatggaagcgcccgttttctttacttttactttgtaaatttttatcacgttcaaattgcattgttgtttgtcggtgcaaaacccttcgtatagatagtgaatgagcagttcgctgtcgtatttaatcttgttcagactcgtccaatttttgctttttgggggacgatggtgcgtcgccagattctgacccaaagcgttcggcgacaacgttttcttcttcggcgggcccatggtgcggcaccggcgtatcggcaagcttcttattattccacagctttagtctaaacacaccgccgctcaccaacacgtcgtctcgcttgacgctcaggagggcttgcgcttcgcgccggtcgcgacttgaaagattaaactcgacggtgtactcgccacaagtaattactgtgtgaggactgtcatgcaacgcctccaattcgtccgaaggcattatgcgcacgtcgtgcgcgcccttcattaagcggtgttcgttttcggcaccaaactccaacacggtttcgccgtcgctcgcgggcacaacgcgcgccctcactacaatgtcagacgtggtgctgttagtgctcgccattattttgataattatttttgcgttgatttattacacaatatttttcgagtttgacgaaacgaccttttctaaacgattgcaggtgttgactgaatatgcaaaacgaacaaacgcggacaaaccaacaccggacgtgcttggccacgtgtcggatgtgtacgaacacacttatatagttacgtggttcaagaccaacgatttgagcacctatcatgaaactgtacacgacgacacgatcgaggtgtttaactttttagaacagaaattcaacgccgccgcggcgacggtcgcgcatcgcgtcgcgcccgcggtcaacgaacccgacgcgtttgtgttgacgggcgatgcgggcgacgtcaagttgcattgcccgcagcattttcgttttgattacgcacaattaaaatgcgtgcctgtagaaccttgcgaaggtcgcgcgcccggtctctatcccatggacgagcgggcgctcgacacgttggtgcacaaccagcatttggacaaagattattcggcaaacgccaacttgcatcatcccacgttgtatttgcgatgcttggcggacggttcgcacgcggtgcgcgaatgccccgataattacacgtttgacgccgcgacgggccaatgtcgggttaatgagctgtgccaaggtcgaccggacggatacgtgttggattattttcctgaaactttattggtcaacgagtttgttgagtgtcgtgccggccaacatgtagtggcgcaatgtccgaaccaacaaatttttgaccgcgcgcttatgacgtgcgtggaagcgcacccgtgcacgtttaacggtgccggtcacacgtacatcacagccgacataggtaacacgcaatattttgaatgtataaataacaacgaatcgcagctaatcacgtgcattaatcgtgttcgtaacgccgatggtcaatacgcttgctcgggtgacgtgcgctgcgccgatttgcccgagggcacaggccaactagttcacatgcacaccgacgacacatttgaatacgccaccgggcaaatgacctgcgataatttcgaggtcatctccgagacggaatgcgacaccgccaacgtgttggataacaaattgttttttaacaagtttaaacttgttgcggaatttccccgccaagtttttgataacggcgtgtgtgcaccggccacgttgactaacgtgcgcacgttaagcgacacgttttctattgaaaatttgccaaatgattacgacattgacatgcaaacgtccatggtcgggttgacgagcatgattccccgtttgttggatggcaatgacccggacacggcgttcggggaaaacctgttgctggcgcgtgacgtcaacgccgtgggtctgaacccgttcaccggtgaacccatcgattgttttgggccgcaattgtatgacgtgttgaacgctagccgcgccaacgtgtgcaccgaatcgggcgacggcgttttaaaaacgctcgaatttggcgatggcgcgtttttgagcgtttttcgcaacgatttgagcggtttggacgcggattatgagcgtttttgtgcaatatcctacgaaaacccattaaaaatcgtagaaagcgatcatttacagcatcgtatattaaccaatatactacaatcggacatttgtgctaacctatatactacgatgtaccaaaaatatactacactggcacagaaatatactacaactccgctacaatataactacactctcgtaaaacaacctcgaaatatggtagtatatgctaaaaatatacaattgaaaaacgctacgatttctaaaccagcatttgatcccttcgcaaaacagccattcgtcaataaaagcgggctggccgaacccttgtttaatccgtttgcaaacgccgtctggtatagcgaacccggcggcgacgatggtgaccattgggcacccgacccaggccccaatcctcaacccgaacccgaacctgatgaatccgaacatgattctgaatctgatgaatttgaaccagtgcccgaaccttcgcctttgattttagataaaaaagatttgttttattcgtgttattacgagttgccgagttacaaattaactagttgccatgcggaaaacgacgtgattattgacgagttggcacgattgcgaaacaacgccaaagccgacgccgaatgtgaaccggccaaagacctgcattacgtgttaaacgcgtatgtgtacacgggcaacggcatcgggtgccgctccgtgtttgatggtaatgacgtcaccgtaattaaagagtcaacgccctcacacgtgtacgccaacttaaacacgcaatccaatgacggtgtgcggtataaccggcacgtgcatgtcaaggacggtcggtacatggcgtgtcccgaacacttgtacgacgtcaacacgtttacgtgcaacgccgaagcggacaaattgtattatttgaacaacatgcaagaataattgcgtcattataataaaaatagcatgtgcgttttacaagaacaatcatatgtgaaaaacaggataaataatttatgacgcaataaattgcggttaaaagtttgtaataaaatgtaacggagtgcgcacaattcaatcacacaacctatttgactgcaacatgaaggtctcatttgttgtattaatttttctactgtggctggcgaacgtgaaagctggcatgtcggcacgttggcggtatgtgtgtattaaagtttagttttgtacaattaattttattgttttaattaattttaatgtgttacacagttttaatggaacgcgacacacaattggtacgcgcatcggctggggcggcaacgaacaagacccaaatttgtattattaaatatctaatttaaatatttaataaatgtaaaatatatttacaaagttgttttatttgtttcaaggttgttgtgtaccgttcaagttaataaactggtttagtgaaaatcaatttcagttccaatttaaacaaaattgcgcttcagaccgtaaaccgctagggaaatttattgtgatacaaaactaataaaatagaaatagatgcgagtcggcaaactagcgcaataagcagtatttaataaagacgtttctacgcagtttaccacttcacaatgcagactaactcaagtaataacgctaataaattaatgtttctgaaagcgttagatttgcaaccttgcgatccagtacaatgcgtcatttccaacattgctgaaaaatgtagtgccggacttgcaacaatggccacaatcaagcgcaaattgaggtgttttgatttaactcaagaccagtttgacgaggcgttgcgtttgtcgttgaaattaaaaaataaaaataattgttaatatattttatttattatataaaattattatgttaacgatttttaaataaattattatctttaatgagtttaatgttttcatttgttaattgttggttttcctgctctaacttggcgtttcgttttgcccattgtgtgcgcttatcagctagcgtttttaaagcgcgttcttcttttattctgatgtttcgtaccgcttccatttgtttgcaagcatcactgtaatcgttgcggcttttttcaatgcggcgctcgattgcctcgttggttagcgtcaatgtttccgattgcaaatgcaaagtgtaattgagtttagtttgttcatttatttgttcttgcaaacgcgtcaacacaatacgcaaatcatctggtgtgggagcgggttcgttatattctgtttcgagtaaaatacttttttcaaaaacgttgcgtgccaacgaacctgcgtccattaaacatctggggtacacttgctcgcgcacctcgttcactccgcatcgcaacacttcaaccacattgcgattgacactgtacacgttaaaatgcgcgttcttgcgtcggcacatgggacattctaagcgtttgtctctgttgcgctgcgcaattttgcgcacgcaagtaacgcacatttgatgtttgcacaaatgcaattccacgatgggcaccatgttgattgcgtcggcgggttgcaaaaaattgttttttatttcggccactgtaaaacaaatgtgacactgcagcctgaccgtatccattgcgtttaggcgtttcttgctacttctggtgcaatatttgctgggtttgcttgaaggttaacgtcgccaggcggcacaaacggggcgggaataaaattgtttgcgcgcaaaatgtcgttttgcaagttgaccaactggtaacccaaaaacaagggtacgtacataggatattcttcgtatcggttgagcgtgcgttccagcgcgcgtgtgttgccttcaaatttcaaaacgtttctaagctgcaaacggttaggacgcgttcgaataatgtccgaagcgcgcaccgggttatacaattcggtgccttcaacggtggccactaagcctctgttgtcaattacgcatgtgctgcaatttcgcaaacgcaaatcttcgttgtcaatttgcagcgtttcaggtgcaactgcgcgacgaattaaatttcttaaaaatccgggcaaactgttgaacaccacgtcgccgggtccgccttgattaacaccggttacatcaaaataccgcacgtcgtcgttggccacgcgcgagcagtacgcttgcgggtctgtaagcgacaaaatgttacgcgttgaattatacaccctttccacgacgctgtacgtgtcgtctataaaactttcgttacttcttaacgaattgcaaatccgttcaatttctgcacggttatcatagatcatgtgaaaaatgagttgttctgacaacattctgctggacacgttcaacacttgttgataattagtagatgtgggaactaatacgcgttttaaacccgtttctttgtgcccaaccaaatggcgggctatggtgcgcttgtattggttgtcgtcctcgtcaaatatgggcaaaaccattttcgacattttaaaatccctttttaaatggtaattgcatataaaataaccgtcgtctacggacgcgtcggccgaacacggcgacttgtacgtggcgcacgggttgaacgaatcggcgccgcccatgatgcagtggttcgtcgaccgttgcgacaacacgccgggggacacaagcgccattttttgctacaatggacgactttgtgattgagaaagaaatctcttatacaattaatttcagccaagatttgttgtacttaattttggattcttatattgttaaaaaatgtgattcaccaaagcgttacgtagacttgtacgacatcaacaacgtgcgaacgcgcgtggcggatgacagcatagtgagcgtgctcaaaagcaatttgcgtgacgaaagacttgtgcattgggtaccgtcgaccaacgcgttggtgccgcttgtgtggcgcgaaaaccgtgaaactacggtgccgcgcgaaagcgtagagcgccagataaaatcgtgcattgacacgcttgtatacaagttgaacggtattgaaatcaagtttgaacacgtgtacttgcaaaacaattttgccgaccggtacgagccgagcacggcgcacaaaatcgtcgcattaaaaaacgcgttgcttaatacgcaatgcgcacatcccactcaaaacttgcaacttggtagcgacgccatcctggcgcgcattcggctcgagctagaatttgcggacgttgcacctcccgccgaccaattaaatagtttttgcgagttgattgtgcaaatggaagcgtttgccgattaccaaaacattgcgcccagcttgccttacaccacgttactcaacaaagtgatgatgcgcaagtttaatcgggagcaaaaaattacctacggttctggcgatttggatagcgcgggcgtaaaaaaatgggccatgaaactggatggcgtgcgcggtcgaggcgcgtttaggcgcaactttatgatcgtgcaaacagacgacatgcgcctatattcagctaaaattaacagtccctttggccttaacaacattgtgacgtttcaatgcgaggttgttgacaacaaaatttatgtaacagatttgctgcaagtatttcgctacaagtacaacaaccgtacacaatacgaatgcgatttgcacaacgcgtattcgctaaacgcgttgacagccgtcgaatgtttaaattatttgcacactaacgtaaacagcgtcgcattgccgcaacttggcgaactacgttttcagcagttttttgacccgccgttgactcattctctttacactacagtgccgatagacgggttcattgtgttggacgaacaattacaatatgctaaatacaaatggatgccgaccgttgaactgcaatacgatgcgcatgcagacaccctcaattcgattgacggcccgttggaaggcagagttattgtcgcagacgtgccgttaacgcacaaagccgtgtatgaatgcgtttttactgacacggtgataaacgtgcttaaatgccgaccggacagaattgtgccgtctaaagtgtgttaagcgggtaaaacgggcaatcggaccgccaatgcgccacgcaatcgtcggccacaaacgaatacgcggtgtttgctagcgtgttgcacgacaccgtccacagcgggatgccaaaataattgcaatgtatcagccgccggcaatcccacggcaccgcgtacgtggcgcgccccgaacttctgcacaacggccgcacaaaatcttgaagctgttcatccgttgtgatttcagccggaaaatacatgggttcgcctaacggttcaggactaggtggcggtgtcggtgaacttgttggcggaggagttggtgaaggcggtaaaggcgtcggtaaaggtgaaggtgttggcgaaggcgtcggtaaaggtgaaggtgttggcgaaggcgtcggtaaaggtgaaggtgttggcgaaggcgtcggtaaaggcgtcggtgaaggtgttggcggaggcgtcggtgaaggtgttggcggaggcgtcggtgaaggtgttggcggaggcgtcgatgttggcgaatcgggcacacgtttaaacgttgcgagcaaatataaagtcaaaaatataactataaacaaatgtattaacgtaaaaatgtaagccattcttaaataaaaattatatatttaatagttttttgtattgttcccaaatcatgcgttcgtggtgcgcgggcggctttttgttgcgctgaatccatttgtaatcgttaatgtgattgtgaaacgtcatactaatgtacgccattaaatttttcattaaaacgtttggcggtggcgttgccgaatcaacggcttgcacttgttcacaatacgagtctgtgaacgtaattggtgtaccgtgacgctcggtgtccagtgccaattctatcaattcaatgtgatatataatgtaacccttcacgttcatgtaatggtcgcggcacacggcgcattgcaaaataaaaaatatattgtaaaataagaccttcatggtttttaattgttgcgttacaaaatcagagctacttttgtctcgagtcaacaccatatcgtcaatgatcaggctcaaaaaatgtatagtgtcccatattgttgtaaacgtgtacgtaaaacttttaggctgacacgagcgcaaattgagctcggcggtcttgtccataaactcaattcgaaattgttgtaaatcaatgtcgggcggggcgttggcggcccattctataagctgttgcacctcgtacttttgcacgtccttgtatttcattaaacacgcaaaatggtatagataagtggcttgcaaagacaatagcttggtcaagtgcgcagatttagacgcgcgcaacagatcaatcaaccgaaacgagtacagcaaaaagctgtctttgtagcgcgaaaaaagaggcgtaagcggaatcatgtcaatcaaaacagtacgcttgtttttgtgcccggtgccgtcgtcggccgtgttgagtgtcgacgacgccggcgctgacgaaccgatgattcactttgaaaatattaaagaatgtttaacagacgcgtcgtgcgacaaaaagacttatttcgccgaacttaaacaggaacaagccttatttatgaaaaagctttatagacacatggtgcttaaaagtgacggaaactacaacaaacaccacgtactgtttgatttgatggtcatgtataagacgtatgtgcaattggcggacgagtccgcgttcggcagcaacgtgctaaattattgcgaacagtttattacgggcgcttttgaattgttcgggttgggtagccggatcgaggtgttggtgccgcccggttgggaaaacgataatttaagtgtacttttgaaacatttgcacagtttgaacttgatagcgattgacatagtgcaatagacatgtggggcaccatttttttgttagtcgtgttggcgtttttgttttacttatggtggaacggtaaacttaactttaactctctcaacgaatcgtcacccagccttgcgcaaagcagcgattcggtgcaagtcgaccccgaaacgcagcagctcaatgtgaaattaaacaacaacaaactgacttacatgcgcgtagcgcacggcgacaacaaagtaagtcaagtgtacgtggccgacaagttcatgtccatggacgacattgtcaagcaaggcaacagccgcgtagagaccaactgcgtgtttattggcaccatctacgattacggcgtgcgttcgcccaacgctgctggcacgtccaacgaagtggccgtgacgcgcacaacggccaattttgatgtaaaagaatacaagaacatgtttatagtgatcaagggattgacgcccagcaaaatgactaaagaagacaacatgttgtactttacggtggacggtttgcacgtatgcctgattgacgccaacgcggcgccgttgtccgaacgcgaattgcgcgagctgcgtcgctccgcgtgcacgctagtgtacacgcgcaattcggcggcgcaacaaattttactggaaaatggttacacggtggtgaacgccgagcatacggcatatttaaagaaccaaaagtcctacagggaaatgtaaataaaaccacaaatgttaaaaaaatatgtttattgagatttaaatctgggcgcgttaatgttcatgtctagtttgttaagcgccattgtcaaattaataaatttgttactgcgcgcgtcgtagttatttttaaatttgtcttttatttgctgtaataaaatctgttcgtcaaacacaaaacttttgttagtgcctgcgttaatgtttttggacgcgttgtattgagtgaacgacgggtgcaaaaacgatttgagatgttgcgtagcgtaacctatcatttcttgcattttctcctcggtcacccacgcgttggcggcgcgcgctgccgtcttgatgtttagcatgtaaattagcgcgtacatggggctgttgttgacgctaaggcgcgtcaggttgtattggtgcacggggtcgttgttaagcagcgttttgtaaggcacaagaccggtttgagggtcgcgccggtacttgaccaaatgagctaaaaacaaacgcaaggaatcctttaacgtgtccaccaccatggattcttgcgggtattgcttggtgagaatgtggtggtaaatggagcctgaaaacggcaagtctgacacaaacttgtggtcagtgtaaacaattaaaaagcggtcctgtacggcgtcgtcgtagtcgtccacgtacaaaggattgttgttcacaatgagcattttgtaattagcttcatatttgagcaaaccttgatatttgcgactctttgaatcgctgttgatcgagtcggcgttctttttaaaaaaactctcgctacattttttcagctcgttaatggtgtacaactgcgagtttagtttgcttacttccttgtcgctagtttctttagaatcgcccgtgtgcgtttcatcgtcaaacttgtgcatcaacaccaacgattcgagcaactcaaaaaaggtcgatttgccagacatgggctcgcccggcaaataaacagctttacggccatagttagtgggcactaccaaaccgcccgcaaagtgcatcaacatgaacgaactggcgtggttaaagtttgtgtagcgcttgaaatacaaatatccttccacgacactcgtcaaatagttgatggaatagtttttcaaatccactttagacatgataacgcgcatgtaaaatcgggttaaccaggtggttaacgtgtccgaatcgcgcgctaaaatagttttgtcccaccataagtttttgtatttgtgcagaatgttggtggcgttggcgtaatgtaggtaaaacttgttgacaatcacgtcatcgtttggcgcgggcgtagcctcgttggccacggcctgctgcaggttggccaaaaacgcgtcgcggtcacaaaggtcggccattaacgtgtccacaaactcaatcttgtgaagttcgcggtgcaaaattgcggcaatcttggcgtgttctctaacaaaaaaattggcatgttcgttaaccagatcgctgccggtcagaattaacgcggtggtgacgtacaacttgttgctggacaaaatcaacatccacatcaattgagatagttcagggtcgctgacaaacaagtcaaatatcaagcacacttttagcgccatgcgattgatttttattttgcggacgcatttgcacgtgttggctttcgcgccggcacggcacgggttgcatttaaaattgtgcacaatgtcttctattttgatcttgttcacgtacaaagctagtgtgagcaggctttcgtcgtcaaagttccaaagctctcgaaataactcgttcagctgcacgcgtgtttgcagctgacaaggcgcgcagttgcctaacaagttgaccgtaccgaaattcaccttgaccatcttgacgtcgcggcacagcttggccacgtggtaggtacgcagaatgtcgcgttcctcggcgctggtgtttaacatgtgcataaacaccgtctcggatagatagggcgggtcgtcggggcgtttaaatgtgcccggcatggtggtgcccaacaaaaacggacaattggaataaaattcgtccgtgatcacgttgtatacgccgtattgggtgtggtacatgtatttccaattgttaaacttgacgttttgcagcttgtgcgaattggtttttatcattttgtacagttcgtcgtccttctttacaatctggtagtgttcgccgttaaatatgagcgtcacttgcgtcaccacgttctccactttgataaaaaaagcttgtcccagcacgtccagcggcacttcacagtccatggccgttttgtgcgtaaacgcccacggatcgtcgcattcgtatgattcgtttgagctgagtttaaaatagatgaagtaatgcgcaccatagtacgaacctagcaaataatacggatttacgcctctaaaacagtgccagtgatcgcacaaattgttaaaaattgaaacgctgcgcgtcacaaagggttcgcaccttgccaatgctgccgtcaacacatccttgtcgtcaccaaacagcgtttcgcacacaagctcaaaaaaaagtttaacatcagtctcgcgaaaactttttctatcgcgtttaattatttgtttccaaatgacaaatagcaaaaagtgaaaatttttaaaattgctgtcctcaaaatatttctgtagcaagtcggcgtcgtcggcgcgattattggacgccaacacttttaccatgccctcgcgcactttaattaaagccttgtctatttcgttttgtatggtttcggcgttttcgctgctggctgaaatgatggccgtgaccgcgggcgcttggaatccgcgttctccggttgtgacggcgagtgacggcgtctcgtttgaaaactcgcgcagtttagttaggtttacgttgataatgtgcttgtacttgggcgtcgtgatgcattcttcaagatttatgttgtcgcgaatcacgtgaaacaggttcttgtgacagtttaccaaatttgcggccaacttgcacgtggccgtggcattgttggccatttttatttcaaaaacattttcgcttttgtcgtcaaaaacggatttgccgttgacaaacagcttgaccggcggcgtttcgtttgtgcacaaactcatttcaatgtttaaaaaagtttcgggattaaacacaaacaagtccacaggacccaaatgcttgttgtgaattatgggtatggtggattctacgctgatgtgaaatttgagaaacaaaaatagctgccatcccgtaaatgaaacggcttgcgacgcgggccaattgggccaataacaatagtctcctgcttctacacacttgttagtgtgctcagggttttcgctgctcaaaaaactatcaagttttaagtagttcttgattacgttatagtgttttttcaataaaaaaggcttgacaaacacacaaaaatcattgttttccaacaccaaagagtgattaatgtagctcacgctctgtttttccgccgcttcgtcatcaacgtcttcgttatcgtgacgcggtgcgcgttggtgcacggcacacgggccattgccaccgcttttaatggtgtttaaaaactcgcgaaaactgtttacatgttcaaacagtttacgagaaccggttcgcgtgtctttaattatcagctgagtcgcgtctcgtagactgttagcggcgtattcttcgttgttggtaacgtcttttaacaaacgcggcaggatgctttccattatggtggtaattgcgtttttaatggcgctttttatgtatgttgctgtagcgctgcgagatcaccatccattcctaaatagaattcaaacgttgctgcgcgactttgacaacacgttgctgtacggaacttacgtacaaatttacgatctaagcacacccgagcgcaccgagcgactgtttattattgcgcccgaaaatgtagtgctttacaattttgataaaacgctctattactacctggactcggccaacgtgttttgccccaacgagttcaccgtaacgagatttacaagcgctacaattcaaacggtcaacgacacgggcgtttactcaacggcgtgcacttccgtcggcagtttgacgctgattgagcattttgccggacttaaaaacaacacgcccgatcacatgctcgtgttggacgccgccgaacagattcaattcacaatcatggacattatcaactatttaatatataatgggtatgtggatttgggcgttgcattaaaataaaacatttaatttatgttttataattataatcatttacaaataacatttcgtttacacatacattttttattaaattgaatacgtgcgcttacaatgttttaaaacagaattaacgctaaatcatatctaaatttgttttacaagaacaactgttgttgtaaatcacaatggttgataattcataatttgcacttgtatttcaagaataattgtacttgtaaaacaaattctatttataaatatgagtcagcgccgagctcgcttttcaagaacgattgtactcgaaaagcaaatttaagtttattaaaaattgtacgtgttgttgtactcgtcaatattatcgacaatctgatcgtgatagcgttgccaatcgcgcacgggcaaaggacatttcttgacgcgcacgtaatagtcgtacgcaaagttgttgctgggaaggtcgtcgaccaacgtgagcgatttaaaataattaacccgtttgtcggccaaaattttgattactactttgggtgattttggcaactcgtcgcccgtttgtgcgttcatgtcaaatttaaagttggacggaacatagaaactttttaactcgcgatctgtggttgtggtcaatacggccggctcgtcttccgcggtcgaaccctcgctaatgattgcgtcaaagtacgacgctaactggaccgcttgcaacgagtgcgccacatgctctttgctgccgtaggaccacagcacaagtacgcagccagacgcgcgcaactcttccaagctgtcgtatacttgcggatcgcgtatttgcacttcttcttgttctgtaatcagcgtgctgtccaaatcaaacacgatcacgtgaggaaattcccaaactaaagaagcgctctgtagcaacggcacttgaaattcatacatcacgtgccattcgtcgagacatgcgtacatagctggtttatgttgaagcacgcacacgtggccaagcacgtttgttttaaatgccatctttatgcagtggcgcacttcgcacatgttatcgtgggcgttaaagaccttcatgcagtaccgcgggttggacgctatgacgttgcagaattgcgcattgcccccgtttaattgaaacaacacgtactcaaagtattcgtatttttcaaagcccaaatattttaaatccgcatattcggttacggcgagaacatgccctcggtaaaaagcgtcgtgcaaccgcaaacacacccatctgcacttcatcgcgacccgtggacaccgcgcaccttattcacaatgtttgccgagtttcgagccaaaaaaaattatgcggatttaattgattttttggttaaaaactttgcgtcacacgttaaaaacaaaacgtttaattttgccggcaccggccacttgtttcattcgttgtacgcgtacgtgcccaacgtaagcgatttagtaaaagaacgcaaacaaatacgtttgcaaatagattgcgttacgcgcttgtttagcaacacgaccaatgactttaaaatgtatgtggaattatttgagtacattgacgcgcatgatagcaaaaccgattgcccgtgtttattgttgcaaaaaagcatgcttaacgctaaaggttatgttgaaaacttgaacagcaaaaggtttgacatcaagccgcccaagtttaaaaaggaaacatttgacacgatattgctcaagtattcgcttaattacaaaaatctgctgcttaaaaaaaaggaaaagcgcacggtaaattgcatggcacgacgacagaaaaaaatcaaacacaggcaattgctaaacgatgaaataatttatttacatgacaacaaaaatttcaacaattgcactttgctacgcgggttcagcggattgagcgtcaaaccgtgccagcacaggtttgctttcgtggaacgtcaaacgcgcgccggcgacgaaatggtgtcctttattcaatactgcgagttgtgtcaaatgcgtgttggctaatagcggcgcctcctgtatcccgtgcgacgggtggcagaacggctgcggcttcggcgataagtgcgcggtctgcccgggcgccgtttgtaaccagagcttctgcggcgacgagtatacgtgccgtttgcggagcgggagcggcgtcgtcggtataccatagcgaagtgttttacaatgtagctttaattttcaccttactattattttttgcgcttggcgggagtgcctaaataaatgtctaattcgtcattgtcttctggtgttttatttgcgtgtttcttgacactttcagcacctttaaaaattttgttataatcctcaatgttaaatttgcaattggccattgcataattttccatggtggtgtaaaacatggaattggccgcgttgtaatacattctcgacaaagggtacggatccaagtgtttgagcagcttgtttataaactcggggtcgtcgcaaaacggaatttccgtgccgctggtaacatattgctgcggctgcagtctttgaatgttgctgccgcgttctaccagcaattcctcaagcgttgtacgtttgtcgcgattcaaagtttcgccttgcaacagcacaatcttggcgtaacgcatcacagggctggcgaaacaacgtgcaaacgagccgcgcatcacgtctacggtagtcatgtccaccgttgtagacggcatttccagcaacgttcgaagcgtgtcaagcatcgtgttggtttgcccttccgtcaattgcggacgacatgccaaatcttcaaacgcgctttccaacaatttaaacaacggatgatatttttccgaacgctctaaaaatatcatggccataaccacgtcgcgtactttaaactcgctagagttggtcgtgttgagcgtgtaatgttgaatgagcttgcgcgccgcagtgcgatagcgtcgcatatcaattaatggagcggttgtagcagcaacaggcgttggcataaacgcgttaaacacggtttgtgcgggcgcggaggcggcggacaaccccgccgcgttacttagcgcacccgttatgccgctgccagccgcaaattgcgacgccatggccgcgttagcgttggcgttggcggtttgtgatttgcgtgccacggtaattaaaaaagccataatgttggcggtgtttacttcaatgtcaggcacggtgtcgctgcacatgcgcagcagctgtggccaaatttccatttgcatgttttcatcgatgaggcgccgcaagtggtcaatgcgtatgtgcacatcgatcacgctcatggtgacaacttatgaaatgttgaccacttcaagctgattggtgtacaaatcgcttagaaactgcaacacgttgactgtgtcttcgcgattcaacttaattgtggacgtgttggcttgcagcgattcgactagcttgcgtgccgcaatagattggttgcccaacgtggtgagactggaaattttgttcgttgacgaatcgttaacgataaacgttgccgccgtttgcgcgttgttaatgttgtgcagcatttccgcagccgccaggtgttcgggtgaacggctgcgcggttgcgtttgatgacggcgcgaacgccgtggcggaggttctgaactatcgcctatcgaagcaatcatgatttaaatcaagcaacagcgaaatctcgttgtccaactgataatcgacaataatgcgccttataaacgtttcgggtacaattttttcaaacaacaaaactttcattatttcaactttgatctgctttagcttttctacgacgaccgccacatctttgtccgcgtaccgttttaaaatgtaccgacacacgtttagtagctcaacttcgccagcggagcacggttcgtcgtgcatgttgttgtgttcgtcttttaataggccgcgcatgtttagcaaatagttgttaggcatgctttcaatgtattgccgcaagaaaaacccaatcaacacggtggccgccactttgtttacttttttaattttggtatgctggcccatttttatcataaaatttttaaaaggcatcaaaagtttgtgcgcgttgggcaccgtggaagcgctgttgcattgctcgttgagcatggtcaataaacggtgacgatctttgcacggcaaaagttttataacttgtttgcaatctttcactaaaggttcgcacattttgtgtttggtgtgcaggccgtaagctttgtcgcacaataaattgtagaaaaattgtacaaacatttgtgtcatcaagttgttttcgttgattacgtcgggttgtgaggtgaaatcagttttgagtattacaaacatcataaacaccatgcccaaaatggcacgcaaaaaaatgtcccaaccgttttgcatattcgcatcaagagtgctcatcgcgttggaaacgtagttgcatttgcacgtcaaacacgacactttattattgatacgacattgctcgcacatgttcacgtcgggcattgacattgaattgtaatattgttttaaatattctataatcattctaaaatgaggtacctgtttaacaaattcgtcgcgcaaaaacatggacatgatgtttttgatgttgtgcacgttgtctgtgctgggctgcgcatcaaaccttgtttttatttccaatatgcatttgttgaattcagtaaaaaaagtaagaccttgcacgtcaatcaattgttgctggtcaaaatatttggcaagcaaaaaggctaatgaatcaatttcgtgttgttgcaattgcgcttcaaaacgcacttgttcaaagcaatgctccgagtggcgcatcgcgttaaacctcaaattgtacgacactttgtaagtgtgcatgttgcattcgatattgaccttataaaatggacgatgagaaacgatcgttgttaatagccaagctcgcgggtcaaatcttgacgcgtgacgcggcagcaataagcagggtcatgcacacgccggaaagttcacttaacgaaaaacttgatactctacaaagcatggccgaatcgctgccggtgtcgggcggaacaccatcaaatgctgctcaacgccaaaccaacagcattataataacgcaaaattatgatttgcgttatcaaacactgcgaaccgcgctagaatttttgcgtcgcgcgtcgcgtatcgatgtgcccattgaacagcttgacgaaatacaacaatctcttcaacaatacgaagagtacgtgaacggcgacgggtccgacaatacaattaaaaacaaatttttgactaacgccgaatctgtttaccaaataattaataaaaataaaattgtgccgttttttgaattaaacgaagcaactcgtctatctgcaacaacacaaattagttcaccaacatttacacaaactagttcaccaacatattttagcatatcaacaccgtcacaaactagttcaccaagaccaacacaaactaatttgcctgaaccaataaaaattggtgaagccggaccttcacaaactaaatcggaaaaattgtacgcgctaattgaaaattataaaaacgacccgcaagcaattgaacgtgtcaaaaacttggaaattaaaaacgttttgcgtagtatagtgcgcaatgttacttcgcaagaaatgccgttgtacaaaatacgcttgagttatgaagcgtacaaatctattaaagataaaaaacttagagcgttttttaatctgtacgatgaactaaaatctatagatttttatacacaacaaaaagaaccattgtttacatctcctgtgttaactaccgatcaagatgaactaacagacaccgaaacggaatctataaacaccgaagcggaatctgtaatagctgaaggtccgtatattacaaacgagtcgcagtttgatgacatgagtattgatcgtttggtagattatgttcgtaaaaattataaacaaaaaattaattttgacgcccaagacagtgtagatgacgtaatcgaatttgctaaaaacatttggcggcgcaaaaataatgtcggacaaacgccaatgcatccgcgtgaatggcaaacgcctgtttatcaaaatgataatgatgacggttaccaaactccaatcatattgccacaaaacgttcccttgccaaaaattgacgacgaaacaacgtcgcttgcttccggagttaaacgccgaagaaaacgcgtgccgcctttaccagaatactcttctgacgacaacgattcggatcaggaaaactttgactatgaaactaaacgcaaacgccaacgcgaagaagacaaaaatttcttacgactcaaagctttagagttgtccaagtatgctggcgtaaacgaacgcatggaaaaaatcgtacaagtaactcgagctatgcaacagacgtacgattattgtaattgcaaaaacacaatcaatggcacgcccaacgccaacgcgtttgttaatctgcttatgcgtttaaacacatataatttgagtcacgtcgaaatgacagtaaatttttacgagttgctgtacccgctcacgctatacaacgatgaatcaaatcgcattataggctacatttttgcggcgtcaaattattttcaaaattgcgccaaaaattacgagcgtatgcgcgtcgagtttaatcaatacggaccttttgtgcaactcgattcaatggtcatgtttgtaatcaaatttaattttttgtgtgatttgcaaaccttttttggaaaaattgacaacatgccatctttgggacagcccaacgtatacatacacaacgtgttggttatgcgtgacaaaattgtaaaactggctttcaactcgttgcaatacaacatagtgccaaaaagcgaaagcagacgcgatcccaagcatcttcaacgacttatcatgctcatgaacggtaattttaatataatgtaacaataaaaaaccaataattattaataaacatttattttacaataaatctttacaatacaaactgtacagccttttataatccttgtggttaaaattaaaccgttttctgtacatattgtataacttattgaatagcggcgttccctcagatttattacaaacatatttttttcggcaatgacgcaaaatatcttcaaaatttaatttaccgcttaatgcgcactccttttcaagttcatcacaattcaaaaagtcaaacgacctcgagtcaatttgcaatttgtttaaatctttataatcaggtttgagtttataaattaactttccgcaacggataatgtacccttccaaaggactgtctgtaaacatttcggatttaaagtgtagatcttttacaaaatcgttgtacaaacatttacggtacggaatagtgtaaaagccagcgttttgtaacaagatttgtgccgtttcaaaaggcacaaaagcatcgtcgtttaattgaatttcataggcgtagtattttaaactttttttttgttgcgtgtacttgatcacatttagtggttgatttttagcctcggttttccaacccaacaattcgccaaacaccacaaacgaatcgcactccattaactgttttagcgataacgcgcaagtctgcaagtgcgcactaatgcggtgcacgttcataaattcgacatcgggtcgataggtgttgcgcgatccaaaagtgacggcgttgtcgtgcacaattactctataattgcaaccgtccaatttttcttgcactaaaatctatttgtcggcgagcgtgttcttttttctgtaatccaaatgtgatatggacggataaattttattaaaaatgttttcgtcctccggcatgacgggtccacgttcgttcaacgcgtacataataatgctgtgcaatacgtcggcgcgttcgggcgggtcgggcacgtacttcatgcggtcgttgagctcttgcaaccaacttgtaaaaaacgtaccccattcttcgcgatattctccgcgttgcatcaactcggcataaatttttaatttgtttgtatttttaaacgtaattatgagcttgtcgttaattttgatgtcggccattttgtctgcaatgggcacgacgtgaacgttgttaacaattcgatgacatagcgagtttgtgaccaaatgtacagaatcatccaagtttaatagcatgtttaaaatctttgtagattctggtaattttttgtaatcaagataatattcagagtacgtgcagttaaacatgagctgcaacaaccttttagcgttggttaaaactgcaaattttaacatgcgcctcacaatttttaccatagacacaagagtcagcttcttcaagtaacgatacaattgcacgttttcctgtccgtatttgtccttgcaatcggcgggtttagtaaagatgcctaaatctggtgacttgccggtaaacacgccgtgcagtccaacgtttaggtcaataatcacgacgtcgttacccttttcatctttggtatgcttgttgaccaactcttgtttgttaaacacaaacttggcaaatgtttccttttcgcacttttcgtatatcttgtaatcggcgtcgctgtcgtcagcggcgtaacctttggcccggctgcccgtatcaattttgatgtacaccattgcgatgcttttgtacaactgtaatcatgcctttaaacgcgcgcacttttataccatcagttttgcacgtttttcaagaacagacaataacaaaaaacacgttgacattaatgagtcatttgcgcgataagattaaacgcgtatatattcaagcacaacttggcaaatcatttagtgttatacaacatgttgaacgtgtcacgtttgcttgccagcggcgaacatttaccgtttaaaattaaaattaaacgctatgacgaacatgaactgatggtgctcaactacgaaacgtttgaacgcgaacgcaatcaccccgtggtagtggaatgccgcggcctcattctgcactcacacacatacaatgtcgtatcgcgctcgtttgaccggtttttcaatttgcaagaactcgtagacacacacgcgcaccagcgactgtataacgccaaagaaaaatttaaattttacgaaaaaattgatggcagcttaataaagttgtattattacaacgaccaatggcacgccagcacgcgcggcagcgcttttgctgaaaaccaatgcgcagtggggttaacctttaaaagtgtgattttgcaagcgttaaatttactcacagaaaatgaatttcaatctttgtgcgattgttatttggatcgcgcgttcacgcacatgtttgaattgaccagtggccataacagaattgtgaccgtgtacgatcacgcacctgcgctgtggtatttggccagcagaaaaaacgcaacggccgactacatttattgcaacaatctgccgttttgcaaatatcccaaatgttacgagtttgccagcgttttgcaatgcgtaaaaatggcgtccaaactgcaaaatttagaagaaggttttgtggtgtacgaagaaaacggcgcgccgttgtgcaaaattaaaagtgaagaatacttgcgtttgcacaaaagtcaaagccgcacggaaagccccgccaagttggcccaattggttttaaacggtgaacatgacgattttctggcgcaattttcccaccttaaaaagtgtgtgcaaccgtacattaacgccagaaacttgtttagcgacaagagtaccgtggacaaaatgaactcgggattggccatggaccaacacgcatttaacaagttggtgtgcaatttgccttggaaaaatttagcgtacaagtgtcgcaaagcgcaaacaaccgacgtagaagctgagtttttaaaattaaccgaagcagagcagattcgcatgattaaaaacattgtaaacccaaaaccggttaaacaaaaagccgacacagcggcgcccgtcaagcagctattattactaattggaatatgcggttctggaaaaagcacgtttgctaaaaaacttaaaaattatctcgaaataaacagggacgatatgcgcgtaaaactgtttttaaacggcgattacaccaagctcaacgcgttctacacccaaccgcgcaagtgccgacggtcaaaagaaaatcaagttacaaacgcgtgcgttaaactgtttgaagaagcagcccgcgacggcctcaacgtggtggtgagcgacaccaatttaaattcgacggcaacggaaacgtggcaacagctggccgccaagcaccaatatgaatacaagactcagtttatgaacgtgtcgctggaaacggctttggagagaaatttttcacgttcagacaagtttcccgttaacccagaaattgttaaacggcaatacaaaaaatttttgtcgctaattggatttgaacgctatacgcctcccggcgacaaatttcccaacgcggtgctgtgcgatttggacggcacggtagcgctgcctacaaaccggtctttttacgattttgacgagcgcgtgtttgaggacgcgccgcgcacagacgtcattgcgtgcgtgcagcatctagcaaacgttcacaacgccgttgtggtgtttatgaccggtcgcagtattgtttgcgaaccgtccacacgtcgctggatagacgcgcacgtgaaacttgattcgtataatctatttatgcgacctttgggagaccactgtaaagatagccttttgaaattaacactgttcaacaaatacgttcgaggtcaatttaatgtggtggccgtgtttgatgatcgcccgtgcgtagtgcgcacgtggcaagatttgcaaatacccaacgtgtttaatgtttgtcctgattatttggaattttgaaaaataaaattattaaaatttaaaattgtgtttttattgctgtaatttatttaagacactgtcagcgtaaacgccagttcaatggccgccaataattataaagtcgtagacgttgacacgtttgcgcgtcagcttatcacggacaaatgcagcgagttgatagaaagcgaaaacttgctacccgcaaacattttgcatattgtgaaacaggcgcgagacagttattttgcggacccatctcttaaaaactatgaatatgttaaaaaattatttttgcgcaccaagtacatggacgactcgattgattacaaaaactttaataggcgcgtgttgctgatcgtgtttaagtttgcgctcaacaaaggttccgcctattttccgtcgtacaaagacctgatggaggtggccgtcaagcgcctcaacaaaattaacccggacctgaaaagctcgccgcgcgccatgttgcaacattataacgaatgtctcgaaaatttggataaccccgtcaccgacgagcaccacttggtcacgttcggcaaagaggtggccaccaaaatatttattgaagcgttcgagtttagctacgcgaccaccaacgagatacaattgacaacaacaaacaaacttgaaactgacgcgtttcaacccatcaaaagcgtaccctcggcgcccactctgctcacaaacgttatgaacgaacgcaaacgcaagttgctaaacttggaaacggcaccgcaacctaaaaaaacaaaattaattgcgtcaccacaacatccgcttccagcgcaacgacctctattcgcaatctagcgtttcaagaacaactgttcatgtaaaactagtgtgctatttttaaacatgcgtcagacaatgacctcgatttacgagcacagtcaatcttgaaaagcgtgaataattataacccatcttgttttttgagtaccattgtttgtgtaaaactagtatattctatttttaggcatgcgtcagccaatgacctcgctttacgagcacagtcaatcttgaaaagcgtgtgtccaattatgagtcatcgatggctttgttttttgagtacaattaattttgtaaaacatatatattctattttaggccaatgacctcgctttacgagtacagttgatattgaaaaacatgtccggttatgattcatcaattagacatgcgtcagccaatgacctcgctttacaagtacagtcaatcttgaaaagcgtgtccggctatgactcatcgatggtttgctatttttaaatatgcgtcaaccaatgacctcgctttactagttttacgcgtacaatcaatcttgaaaagcgtgtccggctatgacctcgtttttcgagtacgaccgttcttgtaaaactagtgtgcgctatttttagacatgcgtcattgccagtcagttgccttccgaccgccgaccttaacgcacgtcgccatgtcttccgttattaaaacccaatttgaaaataaaattcttgaggtgaccaaggtggaggacacggatggacaactatggatgttggccaacccgtttgctcgagttttggagtacgccaacgcgcctaaagcagttaccaagtttgttagcaataataatcaaaaatgctgcgaagaaattcaatctgcccaaagtgggcagattacgtcatcattgcacccacacagtaagtttatcaaccgcgcaggcttatttgagctaattcaatcgtcgcgcatgcccaaagctcaacagttcaagcaatggattaacgaagatttgttacccaaactgtgtgacaaaggagagtacagcatggcggtggacgcacctgcggagatagccgagggcatgaacgccgtgcacgcggccgtaactaacggccagcaatctccttggatggcggatttaaagttttacaaaaacgaattggttaaacgcgacaatgcgattgaaaatagggacaaagttatagccgccaaaaacgaggaaaatcagcaattagcgacagcactacagaccgccaatcttaacttggtagaagccaacaaaggattgctgaccgcgtttaatattattaatgaggcgcgtcgcgaaacggcgcaactggccaaccgcatggcagacattgcgcaggatgtcatagccaaacccagcaacccccagctttgccacagcttggctgtgtgtgatttgggcaacgaccagtacgcattcgtgcgtccgcagaagcgcagtttaaagcaaagtctcaacaggctgtccatcgacgaacgtgatatagtgtttcgcagcgactacgtgcccaacgccatgaacgttttaaacaaggttaaagaatctataccccgtaacaattttaaagcaaaacacaacaaaattacgctgctggaaaactataccaaagaacagctgatggaagtaattaactctactatgaccgaacgtcaaatagctcgtttaaatctacataataattaaacaataaaaaattaatttatttatatttgtattttatttcataatttttttatgcatccggtttaggtgccacgccgtaattctttaatagcgcttgttcaaactgcacacgctcggttttcaccgtttgctcgtttgtcattatgacgaccaacaacgtaaagaataacacaatcatcacaaccaccaaaaacccgcacagcactaggacaaactctgtaatcagtgaccggttgtgcgtcacaaattgactcaactggtcgccgtccgtgggcgacgcgtggttgcgaatcgtttcgataatgggattgccggcgcggccaccgccaaggcgggccaccacgtgggacggcgtggccatgttcttacaaaaagtagttgtattgcatagcatgaacggcaacaccgtgcgtgaacacaccgtcaacggacacgcggtcggcaatttttttcagctctgtgagatcgtcaaaatcggaactgtcaaacgtgttgttatacgggttgttgtcgggcatgtttactggcacgctgcctcgcaacgtgattgccacgctgtcgtttttgcaaaaaacgcgcacccgtccgtttctcattgtgtccattgacgattttaaatttagcgagttgagtttcacaatgacaatgggcacgatttgatatggaaaaataagtttttgaaaaatttttacaaactcgacaatagtttggctgcactcggcaatgtgcagcaacgtttgggcgtctttgacatagttgagactggcgcggttcaccgtcgcgcaattggacggaatgtcgccgcgcagcaagcgccgtgtgcgttcccaatttagtttgttgtacaggctgtcaatctcttcgtgcggcaaattgattacgtagcaagcgggcaaacggcggtattgaaaaatgcaaaaaatacgttttaaactaagaatctttaccatcgtgggcgtttccaagttgaaacacaacaaaaatttgtcactctccgtcagttctttaaagtgtgccagcggcaattcgcaattgatcggacgcagctcgttgtaattgagcggcaaagcgtgctcgcgcatgtccacgagctttctagatttcataattgatttgcaagccggttgcatctcaagtcctgggtacgtaaactcaatgggacacgtagggttttcgtggtgcactatgagcgtgttgcaataaaaaagattattggttaacaacacgctaaacacgcgcgtttcgcccgctccaatttccgtaatgggcaccaacgggttccaatacacaattgtggcactgccagtttttttaggtgactggctattgccgctgtaatcgtgttcgtgtttgtacactaacaccgaacgaaaacgtggaaagtttcgtttttccacaaacattctatccgcttccgtgggcacgtacacgatcaaattctccgtcggtcggttgccgacatcgctttgcggttccactaagttgtagggaaatgcaaagaaacgatcgctcacgcaaactttaatttgaaacgggcattccatcttgtaagccttatgaattggttaattgtaataatttttataatattgttaattatgatcatatacacattgcgtgctaaacaagagcatgaagaagaacaaaagaataatgttttgcaacgatgcgcagatataggcggttttggtaacgtacatagtgattattgtgacaaattttacatgtgcgtaagtggtttagcaatcccgctttattgcagctcgggttttgcgtatgattatactacgggtcaatgtgcaaacgccaacacagttgattgtcaaggcaggccttttttaagattatgaactttgacagtgttgagcaacgcggcgggaatgtaattgtactggtagaataaatcgcgttttacacgcgaattgttcacaattataaacacgcaaaaatacattgcgtacaaaaacactaaaataagaaaaatggctgataaaaagtacttcatcgtcttattgtgtaaataataaaacaaatattataaaattataaaatttatttaaatctttttgcactgttttccttgttgtattccctgtcgttgcagaatttgcgttcgtgtgaaccaggtgcgttttccctgcacatcaacttgcgaataaaagtaacgctctcgtaagttgtaggtgatatgttgccgttgtgcaacgtggtggaagcaagcggcttgcgtgcgttgttataaaaatgctgcactgaatgcaaatccatggcgacactcgtaatgaaaaaaacaatacgctacaccgcacttttgtagtagttacaataagcgcagtgaatcccgttcaatagactatcgctcgacgattcgctgatgcccagttctgcggcgtccaacgagcacaaacaattgccgcacttgcgacaaaacaagtcgctatactttttatagcttggcgcgtgcaacgcgttacaattttcacaaacgcgttggtactccatgaggcaattttgcaaattttcaataggaattgagtcaacgcgcaaacacaactgttgcattatattggctttttgttttggaagcaaacttttgtcatcgtgcagcatttccatgtaaaaattattcaaagatattaaatcgtcgttccaatcgttttcaagtttaaatcgggccaataactcgtccacgttggtcgtcgccattattaaaactgtttaaatattataaggttaaacatgcacgactacatgagcgggcacaggttgtttagagaaatagtcagcattaagcgggctcaatggaccatgatctggttagcgttggcgagcgtcacgattgccgtcactttggcttgttacggcgccgtagttgttaacgagcaaatgaacactatctcgcaatcggtaggtgcacaaatccacagtcacacgcaacttcaacaccggatcgtgaacgagttaatggccggacgcgacgctgacttttattatccgctcgtggtgcgttccagcaacgtgatgattcacgtcaacacgtttgcgcgccacacggccaatgcatccgacgtggaatatttttccgagtgtcccgctagcgctagttacaaagattatttgacgcaattgtacaagttaaacaatccgcccgtcatcagtaacgtgttcttgtttgcgggcggacacggtctgggcaaaacatacgcaagttttcaattgggcaaagcgctcagcaagtttgccgacacaatagtcatctccgtgccaatgaacacgtttggaaacatcaacgatgcgggcgcgctcattgaacggttggaaaacgcgttgggcggaaagtgttttatagtgtggacgttcgatgaactcgattcgtacttgttgcgcgacgacatgcgcgacaagaccattacgcagtttgccgagtacacgggttttgtcaagagcgcaaaccgcgttctcgtgttcacgatgaataacgccgaagtgttgttgcacaattattgggctgaccggacgcgcattgaaactaatttaacccattacgaacatgcaaatgatctagccaaagccctcgagtttacccaaatggaccaacgcatgtttttgcaagaaggccaactgagccgtttgtactcgtttgtgggcaataaactttttgtataccggccgtttacggcggacgttgcgagaaagtttgccgaccaataccttaaacgcgcgggcatcgcgcacaccgacatgaatggtttatttaacgaaaatgtacaatattctattagaactgtaaaaataattttagacgatacaattaacaagtttaattaaatgcagtgtcaatggcgtctttgctaaaattagtcaacggttctttgctcaaatcgtaatttgttaatattgagtacactttttgcggtgtcaatcgacacacttgcatttttaattcttgaaacattttttcgtgcacgttcatcattaaatatttgagtgaacatttgtttgcgtttgtcgcaaacatgagtataacaaaatctaacgcggccattttgtaatcgtcttggtagcctttgtaactgcccacaatgcgaaacggtattttagatgttttcaaaaacttgcaagcgttgtaataagtttcaatactgttgagtattgcctctttggcgcccgtgcgcattttattaacaaacaacacgttgcccaattttaattgtttagatttagcgtccaatttgtacaagttatgcacgctcatagacgtgttttcgggcaacatggagttgtacatgcaatatgaaacggcgtttagctctaaaaattgagcaaacaattcggtttgctggctactaggattgttaaactgcaatttgttaaatattgtgtaacaaacctccatgtcatcttttttagtttgaaattgagcgttgttgtcgaccgttatcagtttggggtccattttttctttaaaaacatattcaacttgcccaatgtgataaactacgcgcacgctgttatctaaagatgtatctttacttttcatcatttgtagaacagcaatcaaatatttgctaaacgcatcgacaaacacagctttataattgtcttcgctaaatatcaaataccaaacgctatttctagccggcaacaaagccgtgtaacataacaaacatgccaacttgatgtgtgttatgtgagcgtcggcttcgcttttaatttgcggtataatgctgtaattgaacaatttgtccatttcgcgatcaaatttttccgaaataattttaccattgggcaacaaagctatgagacgcgctttgagcaactgttttgcttcgtcgctgtaaacaaaattaattttatctttgttgtttagcaacaaatttatgctttttatgtcacaatcgagcaaatacgggtccgcgttggtaactttactgagaatttgcaaaaagttttccaactctgcagccatgtgggttttatgtataaaactgggcgcgtcgttatcgtttacattgctgttaataaattgcatctcgttgataatcatgtgttgcaaaaacgtgtaaggcaatgtggaggccatgtcaattactcttatttacaccacgtgcgaaaggtgaggcggcaatacaaaatgtgttgcatgttacatgtttaaatgtatacgcgcctgtacaaacccgacatgtgttcggggatgcacacgggcacggtgcgcgccagcgccgtttgccgaaacagcatcttgtcgtagccgacggcgcaagtgcacgcgtcggccgaaaactgcgtcgtgtccaagtttaattgcaacgcgccgtcgtcgcaaagataaggccttgttgcgccagtatcgtctaccaggtccctgtacgtgctcacgcatgtttgtgcgacgacgaaatctccgccggccgcgtagatgcgcaacagccccagcgccggatcgcaatcgatcaccgagtccggtggctgcgcgtcaattaaagcgttggtcgcgttgcaaaaacccgcttcgcaatttaattgactcgccgcactggcaattacacaattatctctacattgttgatcggtcacgcacggcaaacggttcaacgcacaatccacacctcggtcgcgttggaacaccaaatccataggaggcgcgtatgccgccatgtttgccatgtcattgtgcataaactgttgcacaaactcaaacgcggaaacgtacacgatcaatacaatagccaacaaaattaataactgccatatggtcggcatacttagtttaaaattgcacctagcatgtcgtctgaggaaactccaaaagccacacccatggaaaaattgcttttgagcatagaaaatcaacttaaagtcaaagatgatcagctgcgaaaaaacaacgaattgttggaaaaatacgtgctgatgctcgaagagaaaaacaagcgaattgaagaattgtacagcaatttgttggaggttaacgaacgcgcagtgcagtatcccgccaaaagtcaccaaacgccaatgttgtgtgtggcgcgcgagtttaattgtttgcgcgccatcacgggacaaaaagtgcacgtaaacaaaatgaaacgcgagttgacgagcgcggccgaggtggtcattgactcagtgcgccccaacccgcaggtggacttcaacaatattgttaattacgttgaaacagaatttaaggacaccatgcggttacgcaacaaacgccacttggtatttgagactgaggatgacgccatcaaagtggcggccatgtgcaaatctttattggccaaaaaagagcgggctggcgataaaacgcgtatataacgcagcgctgaccggttctagtcagtcgtcatgtcggtaacagcgcacgtgttgtacgtgcccaacgttccaaaatgtcttgtaaacctacagaaatacgtcgtcgtcgatctatatcaatgctgcaacggagattatttggcacttttgctggtagaaaacaacattaccatcattgacttagaagtgttagaaattgttcaagaatgtaccctgaaggacattaaagatttgcgtgaaaaaatttgtgtcataataaaattgtacaatgaatatttaaacaaaaaataaagtgttgccgtttgaatatgcttaatgaaaagggcaaataaaacataccaagtattattttaaaatgcaataaatacatttaatattatacattgttttatttatcgtaagcaaaatgtatttgctggctttaattctcattttgttgttaatcgtgttggcctcggtcattgcgtacgttcgcttgattgatgtgcaccatgaaaccgtgcgttaccctataactttgtttgacacaagcgacgtgccgctaataaaaccacctggtgaaattgtcatcgagggcaatgcgcacgaatgccaccgcacattgacgccgtgcactacgcacgcagattgcaacgcgtgtcgtgaagggctagccaattgccagctgtttgatgaagacacggtagtgcagatgcacgatgcaaacggtaacgagcaaaccgtcaccattcaagcgggtaaatcgtattgttttgcgttggaccgcgaacgcgcacgttcgtgcaatcccagtacgggcgtgtggctgcttgccaaaacggagactggatttgcgctgctctgcagttgcttgcgacccggactagtgacgcaacttaacatgtacgaagattgcaacgtaccagtcggatgcgcgccgcacgggcgcatcgttgacgtggccggcggcgacttgcgctgcgtgtgcgacgatggctacgtaagcgattatgacgccgctaccgaaacgccgttttgccgcccgcgcactgtgcgcgacgtgctgtttgacgagtcgtttttcccgcgtgcgccgtgcgccgacggacaagtgcgcttggaccatcccggccttaacgactattatcgacgctattttcgaatagaagatatttgcgtcgtggacccgtgctcggtggatccgatcagcgggcgtcgcactacgggacgtttgtttagccacacgaccgccgacggcgaagaaataaacggttgcaattgcccagcggccgacgggttgttgcccgtgttcaatcgacacaccgccgattcgggaatggtgcgtcgtggtgatcttaccgttgccaatgcatgtttgcaaccgtttaacgtgcatatgctcgcgttaaaacatgccgattataaatttttctggggacgcgccgaccacaacaatatttcagacgcggacatggtgtttcaagctaccgccacccaactcagcgacgaacgctaccgcgttatgctgtatccgttgctaacgcctcatccagacgtgacggaaatcacgttggctgacaccggcgtgttgaaaatatccgtgtcatacgacaccgttcttaaaagcacgctgttgcccgcgtcgttgtttaggctgtttaaatggaaagagggcggcacctcgcaacctgtatgcttttttcctggcgcaggccgttgcattgtggccaactcggacgcgtgcattcgccgacacgccggcgggcaagtgtggactgccgaaacgtttaccaactcgtggtgcgtgcttagccgcgacggggccaacataaaaatatggagccccgccagccgctatccgcgcggagacgcgcccgccgcgttgcgtttgcgcggttttttcctcaacaatgatcgcgaacgcaacacggtgcgcgttgtgtctacgggcgtcatgaccaacaacgagcaaattgatgcgctgacgcaaacgcttgaaacttaccccaactactcagtatagtgaatataaagtaaacttgttttttgcggacggccgtttccgaaaagcacaatcggcgctgacacattgttgacacattttcaaaaatagaacgcatctttcgcggacggccgtacacaaaaagcgggttcggcgctaacgcattgctaaaaatagaacgcgttttacgagtatagacgtatttgaaagacgcaatcggcgctgacgcatcgttataaatagaatctgttttacaagtataaatgtactcgtaaaacgcatatattaagccaatttaattatgagcgtggctcaagtagtggaggcgtgcaatttgtatgcaatttttgagcaacaaggctatttgtttcgcgctcgcgtgtgcttggacattgcgctcgacaatctactcaaattgcgccaacaagtaggctcgatgacgcaagtggtggcaatgattgacaaacgtgaaacaaaatgcttgcaactgatggaagaaataaacacaaaaatcaagcaaagaactttaataaaattatacaaatttaaataaatttttaaactcttgcaaaataattgcgttgttattgcgttgataatcaaaggttttgttgtagttttcaaaatccacaaaatgcaactgcccggtgtggtcgtcgtacagcatgtcgcgcagcatgctctcaaccggtttatccacaaacatgtcgttggcgtacagcttttctatccaacaacgaattgcacgtttgcaatttaatttagatgttatgatcgtacaaatacgcgcggcactgttgcaatttctgctccgcggcattgtaggcaagacggacgcggggcgggggtgcgcccgccaagtggccactgtgcacgtcgggcgctgcgagcgggtccggcagcgcgtttcgggcaaaggccgcagacagaacaaaagcaagcaaccaaaacagtttcatggcgaacgcggcccgtttaataacttgtttactcggccgcgccttttatagccggcgtgcggccacagataagatacgcgcaagtataaaggttgcctggcgcgctttgcagctcagtgttttcggtaccgcgcccaatataagacgcgacaatgaacctgtttaaacgttgttcgcaatatacaagaattcccagtacagttaaaacgagattaccggttgacgtcatgtcgtacgttaccgttacgctttgctcgtttggcgccgtttctacgggtttcctgtccacggccaggaccttttccgagttgcagtttttgcagtactggctgttaacttcgctctttgttactgggataattaacttaatgctgtttttaaaccgacgcagaaccgaggcacatgaacttgtttttgagttgaagatgctgcactccatgtactttggcaacgcactagtgcactatgcactgctgcgcacctcgcaaagcgccgttagcaacatgttaattaacaacctactacattgctgcgcgttgggactgctattagcggagctcatcgtgctgctgggccacacactgggaacatattcagactaccgttacgccaagatgtgctttttaattatattttttgtatttggcgctttaactgcaggattgttaggcgcggacaacatggcaaccgcgccgctatgcaatgacctgctcatggtttcgtttttgacaactgcatacatattgacagccatcgtgtgggctgttcgcaaagaagccgctggttcagctttgcaacacgtgcaagtaatgccgttcaacgaccctccgccgcccttcgcttccgtagaaatggaggactttgttaaaacaaaagtttaatgtttgtattgtataatattttaaataaaacaaatatttaaataataatatgtttattattcccccatggggatgacgtttgatagtttacaattgttgccgtctacccaattaacaaactcggcagcgtgtttttgaaccaattgcatcatcatggcgcagtcgtcttcagccctgtgacctttaaggttgccacccacgtggcgcttgtacaggtcgaccagcttgtaggattgctttggacgcgcgccccgttgccacggacatagtttaacggtaacggtgcccgacttgctgcgtttcatggtgggcgggccgctgccgtcaagaatggcaaacagcgcgtggtacgcgtcagcacattgcaccgcgctcgcaaacccgttgtctttgaggtgtttgtacaaaatgggaaaatcaaaggcaaacccgttgtaagccaccaagcacactggcggacttagcaacgctaaaaaagattcgatcaaagcaaccgcccgcttgtcaaatagaggttgaccgcgcaggttttccgcgtttaattgcgtcagtgcgctcgcttgttccgaaatgggcacggtgggttcaaaacacaaagtcaacttgttgcaaactcgcgcagcgcccagcagctcttccctggtcacacattgtaggctgagttctgtaatttgagtctggtcgttttgcagtttaggcaacccggtcgtttccaaatccaaaaacacgtaagtcttgacgacagccattgtgaacactgattgtttaggcgtgttatatcagtctaaatacaaaatcgccgcacgtgtacaccgttatgttgtttttgtcaaacaaaacgtttgcaatcgcgtccggctgcgcgttaaattcgttcaccgatttgtctgtaattgtagtggcttcgctaatccacgcttcgccaaaaacgcgcacgcgcgccggttggcggccgcgtccgtgcgctttttcgtgtgttagcagtgcgcgtgccaaacgccaccaattccaacggtgcgccaacacgctgtctgacgcggtgcgcggcgcgttcaacatgcttgatgccgcgttccgcggtatctgtttattaaaataattttgcgcgtccacgtccgcggcgtagcgacacaacgcggccacgtgcaaacgcgccgggtcgtcgttttcaaaaccccaatatttgacaaacattttgtccgcggcgggatcgtaatggggcggcgcgtatttaaaataatacaacgaccaatcgcggcggcgcagcgctcggcgccgtgccacggcgctcgcacccaccacgtccatgtactggtcgaacggtagcaggcgcaaaatcgcgtcaattaattctatgggcagccgcggcaacgcgggcaaaagctggcgacacaacctgcagcgtttgcttggtaactccatgagagacacaaaccaacgccgcgcatttatatacacttaattcgacgtttaacatcgagtctcagtagcttaatggttagagcgtggcgctagttatgtaaacatgatgacaaggttgcgagttcaagcctcgcctgagataaacaattttttgcaatataataatttattttatacaacatatatacaaatgtgtaaaattttatttaatacattaacggcgtgtacacatcataaaagctaaaaacgctataatacaaaatactatagtataactgccaaaactaccgtaaaaggtaccccaggataaatcggttaggctttgcaaactggttgtgtgaccgccaaacttggtgtactccatggtagaaattaggttgcttttttgctgggcaataaacgaccagccgctggcgtctttccagctttcgtgaaaactagtgttgccaattgtaggaatccaaaattcaatgtcgtcgtcaatggccagctccttgtaattgttaaagtcaatacattgcgcagagtccgtgttggatacccagcgaccttccctgtaaatgctgttattgtagcaattgctggtgtgcggcggcgggttggtgcacggcatcaacaagaacgtgtcgtcggacagaaacgtagacgataccgagtttttcataaggttgccaataagccgctcgtccaccttggccaccgacacaacaaggtcatgaaacatgttgttaagcttgttaatatgtgcgtgtaacaattctaagttcatgcgcagcatgtcattttcgtacatgagctcctcctgaatgtgcatcaaatcaccttttgtggccgtggcgccttcgtcgtgcttaggccgctcgttgtgacgccacgtgcgggggcgctcttttacgacgctttccggtttgcgcctaatacagcggttaaatttgcaataccacttgctttcgcttaagtcaaatatgtcgttgtcaatcaagcaatgctcgcgcgtgaccgaatttgggtctgatttgtcgtctttaatttgcaagcacgccaccttctcggaccgtcgcgtggactttgatttttcttttaaaatcatgctgactccgtcgcggtgcaacacttctttttcggtcacgttgatgacacccccgttaatgtcgagaatgtgcaccgtgcattgatcggtttcgtcatcgcactcaagccgcgtgtacattttggcggtcgacacgccgcaacgccacgatttgttgcacgtgtgatgcgcaaagtggttgttattctttcgctttactagttctttaccaggcacccacacgccgcggcccacgttgtcgcggaaacagtcgtcactgtcgctgccccaacggtcaatgagctcctcgcccacttcgcattcttggcgaacgccccacatgagcaggtcttttttttccacggtcaacgtttccaatttttcttccacgcgagtgttggggtccagcgagccgccgttgtacgcgtacgcttgatagtatcctttgtagccaatgattacgttttcgtccaggtcggtctcttcaatgtcaatgctcacgtctttttttagcgattctttagggggagtaataggcaagctcttaatccgccacgggcccgttttcatttgcgcgttgcagtgttcggcacccgccgatagctgggcccacaccaccaaaactaatagagcaattctcatcattttgttatgtcttgtagcacagctcaattgtaactgatttaccagcacggctcaggcctttatatacccatgtttattaacgcgtcacgcagtggggtcaacgtgcgcactttgcctacgtgacttcaacaacgtgcgctaaatctttatattttatcagttaatacttatatcttatcttgcaatatataaactcgacgcgtttgtgatcgtgcattagtgtcaagttgccagccaacatgcacacttcaaggtaattatttgtgttgctaagcggcaaaataaacaaataagcccaattaaacttgtattatttatatgtaagaccttcatcaaaatggtagattcaccagacaccctcacgttcagctacgcgcccgacagtagtctagaagtaataataattacgaacgcggccaacgaccacgacggttatttggaggtgaacggtgccgcgcggttgttggcaccgcttttacaaaaaagcgcctccggcttgtggacgggcgcggcgccgtcacacaagctgacccgtaacaacaaaaactttttgcacgtgtttggcttgtttaaatacttgcaaagttacaacttaaacgctagcgcgcacccacctcaatattacaccgtcaaagccataatttgtgatttgctaatgggcgtgcagaccaaaacgtttgacccgctgtgcgaaatcaaaactcagttgtgcgccattcaagaaagtttgaacgaagcaattgtcataattaataaccacgcttctgcagaaccacctttcgcgccgccaaacacagaagcgcgcgagttggccgaattgttgcattctgagtatagcaaaaaattaacgtttgctaccgacaccattttggacaacgttaaaagtatcaaggacctggtgtgtttaaacaaataaaaataaggttaaaaatgaatttctgggctacctttagcgtatgcttggtggggtacatggtgtactcgggccacctaaacggcgagttgcaagaggtcaaatcaatcttaattgtggcgtacgaagctgcagaaaaacactacaacggcgtaatagatgaaattgaatcacttaaaacggacacgtttatgatgctgtctaatttgcaaaacaacaccatccgcacgtgggacgcggttgccaaaaacggcaaaaaaatagcaaacctagatgaaaaaattaacgggttgttgtccaagcacgcgatgccccacgcggccaatgtctgataagtaattttataaaaaattacgctgtacctacaatataattcaatatgacgtcatcttgtatgacgcccaacaacaacgtcatgtttgacgacgcgtcggtcatgtggattgacgccgactacatttttcaaaactctaaaatgccgttgtccacgtttcaacagctgttgttttccattccgtcgaaacaccgcaagatgataaacgatatcggcaatccgccgtcttgttcgtttccaccttccaataacacggtcaagtacatggtggacatttacggcgccgcggtgttgacaatgcgttgcccgtcgttgttttccgaccagttgctcaccacgtttattgccaataattatatgagcttttgtaaccgacaacggccgtgccaaccaccaccgtgccaaccgcaaacgccgccgtttgattgcgttcaaaagcaaattgtggacgcgttggaaaaactggcgcaccaaaatgacctgctcatcaacagcgtcaaccaaatttcgctaaatcaatccaaccaattcttagaattgcgcacgcagtacgcgcagattatggccgcgttggaaagcgccaaagacacaatacttaaccgtctcaacgtgttagtggatgaaattaaagccgcgttgcctgaccagtccgctcagctgcaggaacaaattgacaaattgcttgaagccatcaacgtggttgcgcaaacgttacgcagcgaaatgaacaacaccaactctattttgaccaacttggcgtccagcataaccaacattaacagtacattaaacaatttgttgaatgccatcgaaggcataacgggcggcgaaggcggcggattgggtgacgccgaccgtcaaaagttgagcgacgtgcttgatctggtgaccgaaataagaagcattttgatgggcagtcgcaaataaacatggcacccattaaaaaaaaatcagaagaaacgtcgcaaaaaagcgagcgatctatacaatttaaatcgaattacagcaagtttactacaaagaaaaaacaagcgcctgaaattgcgcgactagccgctatcattgaaattaatgtaaaccaaccagaagacgaagtaaacaaacttgaattgcgcgctcaacaattgttaaaaaatagaaaaccgtctatattcaacgaaaacaacgtgcgcgcttttttaaacagaaacatgtttgtggtggcgtttgcgcatcccacctacccaatggattacattgaaaatacaacaagcataacaataaattgttctaaaataaatcgaaaattgcttttttttgacaaaaataaaaaaatgatgaacgtgttgcccgaccgcacggcgtttaaagtgcaaatcaacgacaccacaccaataaacgtgcaagcggcaatgtttgatgaaaaactagaattagaaattgaattatccaaatcattaaacgagttgatgcccatacaaaaatgtgtaatttatttaaatattcttttgcaaagaaacgtgcaatgggcggtgccgcaagagttaataaacacttttgctaaattacaactcgcggcgcccaatcagttgttgcaaaacttgtaaccacaatgcacgtagcccagcttaccgcggaacaacgcgccgtgtacgccaaatacaaatttgtcacgtatgcgcgatcggtcgcgttaacgcgctcgcaactagatcaatggcgtgaaaaaaaagttatagaaccattgcccgtgtctaaagaagaaactttgcgcgtggaacacgcgacgcggggccaaaacaaaaacgagttgtggtacgcgttgcgcgccgatcgcagcaccgcatccaaatcgtcgagcggcggcgtcggtatgcgcgcgcctgccctagcgtttggcaacgcgcaagaagacgatgtaaaaacaaccaatgcagaattgtttttggaattgcgacaactcgccgaagaacgcgtcggatgtcaagccatcgacactgtgctaaattgcggcatgtttttgagcgcgttggggctacattcggcctctcccgatgcctattttgccatggccgacggttcgtggatacccgtcgagattaaatgccctttcaattatcgcgacacgaccgtggaccagatgcgattggagttgggcaaagcaaaccgcaaataccgcgtcaaacacacggcgttaattgttaacaaggcggggccgcccgagtttgaagtagtcaagacgcacgatcattatcgacagatgcagcggcaaatgtacgtgatgcgcaacgcgcccgtgtgcttttatgtggtgcgctttaaacacaacctggtagcggtgacggtgccgcgcgacgaaaagttttgccgcaaagaagctgccgccgagggagccgcgtttgtggcttttgcgctggaaaatgttagccgcgaacagtttaaacgcgcagacaaacgacgcgcatcgtttgcaaacaccgatcacgcttacaacgcaacgcaaattaacgcgctagtaacgcgcggcttgtatttggcgtatggacagctaaagtgcgcttattgtgacagttttgaaatggatagcagagcaacgcttgacgcggttcttacaaggccgcacgaacgctgcaattctgcaaatttgcagattcacaagtttgaaaatcccgcttttatggattttgccaaccgacacattagtttaattaacgccggtcatcgcgataacgcgcgtgagttggccacaacaggattttacgccactgtcgacggattgaaaaccttttgctgcggtgttcgaggtagcgctacttcgcacgctcatattcctacgtgtttgtattatttgacaataatcaataaaggtttataaaacaaaatacaaaatagtgtttattatttattaaaataaacatttttacacaacgttaataaattgtttggacacaaatttgattttaatttcggcaagaaccggcccctccttgcctttggcgtcaacatacttgtttttgttgagcacgtttgtttcatatccgaccggcttgcagctgtcggtaaatgattcgtcgcacccgtccatctccaccccgtcccgttgtactctgcctccgtcggtctgcaagcggcctcttcggggcccatcggttacataacgcggtggcggcgcttcgtcgacccattctttaattacaatatttaactcggaaacttgatcggcaagcttacgcagttgctgctcgtcgtgctgcaccaattgctttatggtattaaaatcgccaagtctaaactgcttggtttggcgggtggcactgtcgtaaaacccgtcaaacgtggggttgtagtcaattaaacgaattgttttttcgccaaagctaaacgcgttaagcgttcgctggccggttctaacgtacaccttcaacacatggtcgctgcccatttgtttgttgtatgtcaactccatcttgacaacgccgtttgacctgtcgcatgtcatttgaacataatcttgttcatcgccgtcgtagtacacaatgactgtgggcgttttcattttgtgtgtttattttgtggggaacagcaatagactgattaaacaattcgacgcgcgcgtttttatagcgcaaaataaagataacaattgaatcatttttaaaatacattgtttttgttagcaagcgtcaaaaactgctgcaccgacatgttaattgtcttttcagcgtaagctgcgtgcaccgctgcaacgttgcgcataatgttttgtggaaaaacggcgaatccttgttcttgacaagctgcacgtactcggcaaaatgttgtaaagcggctgtaaagcgcgatccttttatataccgctgtgctttggaaatttcgcataaacacttgtgatggataacaaaatgtacgtacgcatggagattaaatttgacgaagatacgggccgtttgcaaattggcgaccgtgacgtgtttgtgcgcgtgtttgagcccggccaagaagtgtttgacgagacgttggaccaataccatcaatttcccggcgtggccacagacgttgtgtttcctcagctaaccacgggcgcgacggtgagcgtgcacactgcaatcggcccgtactcaggaccgttaaccgtcagttgtttcaactatcacgtttgcaacaaacgctttgtgtttggcgtcatgccggcgttggaggtgcccgccgatgtgcacccgcatttgcgccttggggcgcctattttgtgcggcgaacagctggtgtccgtggtgacggccgtgtacgagcgcgccgacggcgtttggttggtgccagtgacgggcgtgcgcgaagcgcaccaagtgtcgggccatgcgcgcgtttgcaatggtgtgcgcgcagaacgcttacgcgatggacgatcggtgtacggcacggtacaattaccgtacaacaaagtaaaagcgtacgcgctttcacagtcaacgccggccgccgacgcgcgcgaatcgtgcgcactgttttacaacgattcggaagtgcgcattactttcagcaaaggcgaatttgaacaaatgcattggcgattgccaggcccttttgtgggtcgtttggtataattaagcattattaacaaaatattagtatatttatttcaaccatttcaatatcgtcatgtccaagcctagcattttgacgcaaattttggaagccgtaagggctgttgatagcaaagtaaccgctttgcaaacacaggttgaccagttggtagaggattccaagacacttgaagccctcaccgatcaactcggcgaactcgacaataaagttagcgacatccaatcaatgttgagccttgatgacttgcctgaaccaccagcacccgaaccgcagcctgaacctgaaccggaacctgaggtaccggaaattcccagcacccggcgaagccgcaagtaaagttaaaacagcaaatcaatggttttaaaatattcgtacggttctttgactagataatacaacgcaatcattagaaatacggcaaagtatacaaaaaatgtaagctctcgatgcaatataaaggccgcagcggccgcccctgtgtttaacaaaaataaacccgctaccaccctatttaatttgttattattttcattcatttccaataacgtgttttgcctgaatgtgtactgcataaattctaggcgcgtgtacagcgagctgctggcaagcgcttgacccaccaaagtggtttcatcaaaatctttaattacatcgctttcatctaattgcaacatttgaccatctgagttaacttcgagcgccgccacgtagtcgagcaggtggaacagcgactgaaacgttgcgtcgtcgtccgtttccacaatgtctgaaaagaattcgggtaaaaattctattatttcgcgcgacgtgttggcgtccagcgtttcaaaataggcggtgagaaacgtgcgagacaagtcgtcgggaaactcgcgcggaaacatgttgttgtagccaaacggatcccatagcgccaaaactaaatccgctaacgataaaagaataagcacaatgcccaccacggaagcggctttgatggcgatgcgagtcaaagatttggccgccgtagttagcgttttgatggcgatcctgtttattgaatgcaccatggccgctttgtacgtttcgcccagcaaacgtaccgtgacgcgctgcgacgtgctcatcaacatgcgtttaagcgacggaattaacgcggtattaatttttttcaacatggttttaaacgcggtcatgagcatgtcaaagccaatgtcggtggcgatgctgaacacgaaagaatagtcttccaaaaattgagaaataatcaattcaaggtctttgtcgcttaccgacctatctaacgtgcgcgcggtgacaatcgaacgcgacgttccgcgcgtttcgtaagtaatgggagttttggtaaagccaacctcagccgtgtacgttaactgcatcagcgtcccgttctccaccatgcccaagtcttgtaacgtgggcgtcttgctaaataatttttcaaaatcataattgattgtgcgatcgcgcacggcgcgccattgtgcaagtacggcgttggaatcgaccgctggacgcggcggcaaaataggcgacggcgacgtgtaatcaaaatcgcgcaactcggaaaaaatgttattggcaagcattttgaatgtgacataaagcgtgtcacccaacacgaaaccgatcaaggattcccaccagcgcaacgagcagccgccgttcattagctcgcgcccaaaacggcggcaataagcgtcgttaaactcgcctttgaatcgttcgggaaacagcgggtccgggtcgggacgcacgttaaacgcgggcacgtcgtccacgcccatgatagtgtgttcttcggtacgcaaatatgggctattaaaatacatttttgaagttgaatccaccattacgcactggttgttgggcgtgtacgtgaattcggctgattgcacattgttttcggccccatcgcgcatggctgcagctcggtccaagtggtaacacgcgggttgcgcataagctacgcttgtttccgaagtttgcgtgtacatgaaaggcgtttggttggacaccacacccgtttcgtggaacgggtaacaactcatgctgtcgcatccgcgacggctaaatgccaacttaaccgccagcgcgcgatctctaagcagtggcggcacataatagtcgtcgtcgcttgacgcgggtcgcaacgtgtaatcaattaaaatgtgtggcaaacgcgtgcgccaacgttcaatgaactcaagccgatgcatgtgggttgcgtaacgacttgcgtttgtaaggtcgacggcggtcaatactgccatgtttgattgcttaaagtataaaaaacaacttttttaaacataatatttattaaaaagaattacaataggtccaattataattaatcaatggccttgcttttcaaatatgattgttcttgtaaagcaagtgttctattttttggacttgcgtcagcgttgacctcgctttacaagtacaattaatcttgtaaagcaagtgttctatttttagacgtgcgtcagcgttgacctcgctttacaagtacaatcaatcttgaaaagcaggtccggttatgattaatcaatggccttgcttttcaaatatgattgttcctgtaaagcaagtgttctatttttagacgtgcgtcagcgttgacctcgctttacaagtacaatcaatcttgaaaagcaggtccggttatgattaatcaatggccttgcttttcaaatatgattgttcctgtaaagcaagtgttctatatttaggcatgcgtcagcgttgacctcgctttacaagtacaatcaatcttgaaaagcaggtccggttatgattaatcaatggccttgcttttcaaatatgattgttcctgtaaagcaagtgttctatatttaggcatgcgtcagcgttgacctcgctttacaagtacaatcaatcttgaaaagcaggtccggttatgattaatcaatggccttgcttttcaaatatgattgttcctgtaaagcaagtgttctatttttagacgtgcgtcagcgttgacctcgctttacaagtacaatcaatcttgaaaagcaggtccggttatgattaatcaatggccttgcttttcaaatatgattgttcctgtaaagcaagtgttctatatttaggcatgcgtcagcgttgacctcgctttacaagtacaatcaatcttgaaaagcaggtccggttatgattaatcaatggccttgcttttcaaatatgattgttcctgtaaagcaagtgttctatatttaggcatgcgtcagcgttgacctcgctttacaagtacaatcaatcttgaaaagcaggtccggttatgattaatcaatggccttgcttttcaaatatgattgttcctgtaaagcaagtattctatatttaggcatgcgtcagccaatgacctcgctttacgagtacaatcaatcttgaaaagcaggtccggttatgattaatcaatggccttgcttttcaaatatgattgttcctgtaaagcaagtgttctatatttaggcatgcgtcagccaatgacctcgctttacgagtacaatcaatcttgaaaagcaggtccggttatgattaaaaaatctcgcaacgcggtaaaccaacacgttgatgataaatataaatttacgtacggtgagcagacgcccggagttagggcgccggctgcggacacggttgcaaagcagagagacccgttgtatttgcaacctcacaccatactcattactaaagtttacgcaacatgtaaataaaaaatttaatttaaaataatgttttttatttataaaatttcataattaattttcttgttctttttccaaacgctcgcggcatatttttttgtgaatctttaggtcgtaatatctgattagttcgccgtgcgccgactgcgtctgcaccgcttccggataaaagtacaattcgtcgtacttgccattgaacacgtatcggttggtgaacccgcaccggctgcagttaatcacggggttagaataaaacatttttgctttcttgcacgccgtgcagtagccaaacttggcgggtcgcactggaaacgtgatcactcccgtcacaaactcttgaatgctgtaaccgtagatttccgcaaacagtgttccgttgatgcgatcaaaccgattgtcggcaatcgctttcataagattgctggtgccgttgattacaaagcaattgacgtcaatagcagacgtgggggtcttgaacacgttgcggtaacgattgagctgcacgttgtgattgatttctttaagcaccaaatctcctgtggttctgagcgcaataaacatgattgtctcgttaggattcttgtattctagcaacaattgttgcaaaactttaaaaggacccttgtggtgtttaatttcaatgtcagtgtgtgtaaaatactttacttgaaattccaacggaaaaatgtattggtaaaaaaaacccgcttcaaacaaccgtttaatgtgtaacgagttgatcttggggtaaatctcgtacgtgttgagcggatcgttgtgttcttcgctgcaatcactgcaagcaaactcgaaactgccaggtttgttgggcggcttttggcgcacgtcgtcgtcttcgtcagatgtcataggcggctggcgcacaatcacaaacaaaaaccatgggcgtttgttctccttgaatttgtaaccgcaaattgtgcaaacagattcttgcacgtgctctaaatcatgtttaattttaaactgtgtcgtttggttaaacgtaagcatgtccttgctgttaatgtatcccgtgacatagttggtggcaaagcgaagagtggccttcatggccgcgcgttcgttttcgctcaaaaaatgcacacgcaaatcgcgcactacatcagactccaaagtgtcataagtagtttcaaatttgtgtccaaattcgggcggcacgtgaccggcggcactgtcgtttaacttgctgttaacgcgcccgatgcgtttaaggcatgccacgtgcgcttgttcagttttgttaagttgcggtcgacgaacgcatgtcgacgctggcgccgcaaccttggcgagcagcggacgaactacgggcgattgcgccgcggtcgagcgctgaggagcgttaaaaatgttattttccctgaaccagttcataattcactcaacactatactgtgcatgtcaacgattgggacgagcttatatacccaatgtttatctaaccacttatctacatccgcatgctcatgcgcctcaagtcacgtaggcgttttgcacacggcactatggtgtcaccaccgcctggctatataaagcgcaaatcgcgttctggaaaaacactttgcaatgggcagcgggctcgtcaacatgtaataagtgtttaatgcgaccgcgcaacgcaacatgataaaaggcacctactggcctaacgtattggatcgcagcgatttgtgcgaagcaaacaaggtaatggattttaattttgtttttgctcacatgtactgcgccgatatactagtggacgccaaagtacaccgcaacgtgcgcgccgcggcgttttccttgcttgacgacaagcattttgagctgtttaaacgtcgtatagataacaaatttttttgctattatgatcgatgcgatgatgtaacatttcccaagcatttacttgacaacgacgcgtgttgccaccattttatcaacgacgccatgcgcgttgtggaatgtgtcaaaagtgtggaaacggttagcgcgggggtgaacgttattgtgcttctaccgtatttaaaacaattgcaaacggcgttaaaaatgttgggtgacgcgtttaaatgttgcgccaaaaccataaacgggttgttattgtatgtcaatgatttgctttcgcactgtttgttgtgcgcagataaaatacaggcggccactcgaaccctacaggttatgaacttgtttttagacacggacacgttgtacgaatgcgatttgtgcaaagaaatttccaccgatcagcggtttatcaaacccaaagaatgttgtcaatacactatttgcaacgcgtgctgcgtcacgttgtggaagacggccagcacgcacgccaaatgtccggcttgcaacacttcattcaagtcgtcataataagtgtgttgcattatgagcggcaacaatttaattgcgctgtcttcggaccagtttaaatacttgtttttgtgcagttattttgatttaaaagattttagccatgtgccggcagaagcgaaagcgtttattgtcaactatttagattgcaactttcgcgttcttgacgatgcaacgctgcaaaactacaccggctacctaaaaagcatacatttgcagcatttgataggcggtttgcttacgcccgacgtgtacaagtatatcaaaccgcaatttcattttgtgtgcgaacgcaccgccgtagacattttagagtttgattcgcgcatgtacataaagcccggcacgcacgtgtacgctaccaatttttttacttcaaacccgcgcaaaatgacctcttttatttatagcgagtttataaaagtgtacaaaaatagattgtttgccaacactaacaatcatggctgcgtgttggcaggcgcggcaggctttgtgtttgaagacgcgtacgtggattggagcggtgtgcgcatgtgcgctgccccgcgacttgacaacggccgtcacccgtttcgcttgtacctgttgggtgaagagatggccgcgcactttgtcaataataatattttaccgccgcatcccaccaacgcgacgcgtgtcaacaacagcatgtttatgttaaaaaacttttacaaaggattgcagctgtacaggttgcaataccaggtggtaaacagtatgaaatttattactcgcaagccgaacaaggtttttgacgagattgacaaagaacttaacagccattcgccttttgtgaagcttatccaacgcgattacatatacgacgcacaattccccgccgatttgcttgaagtgctcaacgaatacatgacaaagagttcaatcatgaagtttatcaccaagtttgccatagaggagcacgcgaacgcaaacgacatgctgcgcgaaattgtgtttgatcgctattcggttgacggttatcgaaaattgtacataaaaatggaattgaccaacgtgtttcccgccatgtatgacaacgagtcggcatatttgtttattaacaaagatttgatgcaactaaccggtacgctaaacgcgttttacgcgcccaaactgcgcattctgagcattctatcggtgaatcggttatttggcgcaacggaaacgctagattaccatcctaacctgttggtgtaccggcaaagtgcgccgccggtgcgactgacgggcgacgtgtacgctgttgataagagcaaaaaaatatttttggtaaaacacacgttttccaacacggtgcctgcgtatcttttaataagaggtgattacgaaagtacgtccgaactaaaatctctgcgcgacctaaactcttgggtgcagaacacgcttctcgagctgcttatcgtcgacgggcccaccaccgtcgccgcacaaactaaacacaagcggttaacatgatttacaccgatcccgccaccggcgccaccaccagcacggacgcgtccggcaacaactacctaaacaggttaacgccaaacacgtttttgatgattttggcagttgtggtggtcattgctttaattatcatattcatgcaatccagcagcaacggcaacaacagcagctcacccgccaacaacccgcaaatgggctttgtaaatccgttaaatgcgacgatgcgtgccaacccgtttgtggccacgccgcagcgattgtaatataagcaattaaaatgagacgcgttcggtgcaacaaggtgcgcaccgtgaccgaaatagtgcacaatgacgccaaattacccagaacctatgatttggccgagtttgatttaaaaaatctttcaagtttggaaagttttgaaacgaccaaaatcaagttggtgctcagcaagtacatggccatgataaacaccttggaaatgacccagcccctgctggaagtgtttcgcaacagggccgacacgcgtcaaattgttgcggttatactggccacaatggggtttgtgcacaatcgctttaatccgctagtgacacattttaacaacaagatggaatttgtaatgacagaaacgcccgaaactagcattccgggtgaacccatactgtttacggaaaatgatggcgtgctcatgtgcgccgtggaccgaccgtccattgtcaaaatgttgagccgcgaatttgacgtggacgcgaccgtggacatgaaagcgcccgatcacggactgcgcattgccaaaactctggctgcgtctaaacgcaaaaggcgaaccagcgacgatgacgattatgagtttattcagcgacccaaaacttttgacgaatacaacaaatgcttggacgcgttgtccgactttaacattactgaaacggaggccacacaatacttgacgctgttgttaattgtggaacacgcatatctgcactattatatatacaaaaattacggtgtggttgaatactctaaatctttgctagaccattcgctgtttgtaaacaagttgcgctcctctatgagcaccaaagcatttaatttactgttaagcaaatttcggtttggcatagaagaatttgacaaaatcagcggttcagctggttctaagtttgcagtgtataattttaccaaataaacacataaaatgattttattagttttgtttttggttcttttaaaagtgctcatttttaaacggctcaatgaaatgcacgtggactcgcaccacaataaaatttgtccgcagggatactttggactaaacgcggacccgtatgactgcagcgcgtattacatgtgcccgcacagattgcgcatgttttgtgaccctaatcacgagtttgatcttgactcggcgacttgcgtgcccatcgtgtacaacccatgcggtaatggatgcacggcacgcatgtatcgtaatttattattgtaataatattaaaataaaacaacatatttaaaataattttttatttgaattttattgttacgttttgtcaaattgtacagaattattgttaatgcacatatcgggacaaaaaagttttaccacgtttacgtcgttgtagtgcgcacggcaacgttgcaaattgttaaaaaaaccagcaggaatattacctgataaaaatataagatctttagggtacaattgatcgggtcccgagttgctatgcacgcgcaatccgttgacgtgtcgagtgcgtttagcctcagtagagcgacgcacgctaagcacgtgccacacttccggaacaaaatttccagaacgcaccaccacaaaacccaatggcgccgtgtacttgttgtaaacaaaaagttctcgaaacaagcacggcgcgcgcacacagcttagcacgtacgcatcccgccgcgcagcgccgatggcaacttgcatgctaatggatcgtttattctcgtacccgctcaccaaacgtgttttatcaacgggcgccgaagcggcgcccattttgaataaataaacgataacgccattggtagtgtggggcatgtagaacgtaatgttgttatcttgttcgtcatcgggttggtataaatagacgttcatgttggtttttgtttcagttgcaagttggcagccacacgcgcaacgctcaccgacaatcatgaaacgaattgacaattaccgacggtcttatgtgacaccgtctacgccaagtcacgcgctgttcaacgcgaccgaagtgcctattgatgtgatggtgaactcgccggcggcggaaaccaactgggaaaacataagtttgacggaaaacatgagtttgaccgagtttgatccgcctattggtaaagaagatttagaaaccatgttgcaaaccccgtgcgacaacctaacaactttagaaaacgcatcgcaagtgttggccaatgacgtcggttcgagtcttctttcagaatacttgtcattcaatcctcgcgccatggaacccgaagtgcagctgtccgaaccaagcacgtctggcacaaagcgcaaagcttctgaagacattgatgtagacagcgatgatgatttcaggggtaagaagcacgtaaacaaaaacaaaattcgcccgcgatacaagaaggcaacagtgcaaaatcacacaacgctgcaagaagaacaacgctatacaaccgagatatgcaccgttgcgcccgccgaacagattgcgcaatatttttctcaagatttttccgtgtatttggacaaattggattgtcaaatgagcgctaaccggttttcagaccacatttctgaaacaggttattacgtgtttgtggtgaaaaaatctgaggttaagccgtttgaagtggtgtttgccaaatttgtaaacaatgtgaccaacgaataccaaaacaattattacatggtagataaccgcgtgtttgtggtctcgttaaataatgttaaatttatggtgtcatacaagttggtgcgcgaccagggcatagagattccgccacacgttaatctgtgcaatgattctgaagcggcgagcaagccatacgactgttactttgaaccggtcaagaacgcgtttcaagcgacgttaattaaacattttcacctggacatgtattatgcgcaaacaacttttgttacgcttatgcaatctttaggggaaaacaagacgggtatgctgttgggtaaactttaccagatgtaccaagatcgctcgttatttacgttacccataatgttgagtcgcaaagagcccatcgtggaaaacaccccgctaagcaggaattacatgtcgtcgtacgtgtcgcagattatcaaatattcaaaaaatattcaatttccacaaggtgaacccaatcaagacattatcgacaggttggagcaaattgtgaccctaaaatctccattgacatacaaatacagtagcgtcgccaatctactttttaacaagtacaatcatcaacgtgataacaacgctgataacctaaaaaaggttaaaaaagaagacggcaataggttgttggtggaacagtacatgtctcagaacgagagcgatgtcacaagtcacaattttattgtgctatcgtttggaagtaatgacgaacggttgaccatagccaagaaagccaacgagtattattggattgcaggcgagattaaagacattaatgtggatgatatgattaaaaaatacaccaaaaatgttcatcatgtgtttagaattataaaagtgaaccggcgtgaaagcaccacgtggcacaataatttgctcaaaatgctggctttgttgttgcagaatttaatcaatattgaagatgctaagcagttgtcggaaaaaagtgatagtaaatttagctataagcaaatatgaacattgattttagctttaataattatacattttttactctattttttttttttatttaaattctattttgcgccaatggaggcggttgcataactataatgggtgtgccggcggcacttgttgcgccaccgtttcctcctttaataataaacctgtatattagataaataattaagcccaaaaatatcactgcaccaataagccatatcaacggcattaatttattactgtcgctcgagttaagggatttgccaataagtccatcttcacccagcaaatgatctaaaccaagatcaccaattaagtcgcccaagttgtagggttcaatgcacatgatagtttgtccgggcagcaagtcgctaatgtccacaaattgcggcgagtccgggtcggcagccgggtcactttgacgacacacagtttgttctctttcgtaattaaacccggtgcatatgctttgcaattgcgccgtgtcattgatgagcgggtcccgctcgcagattgacacgtctgaagtgtttaggttagggtcttgttggcacgtgcggcctagcagcagacaagcgtcagccgtctcgccgcccgacgaaccgcgtatgtaatagctgccgcccgtgttgttaagtgcgctaataatgtcttgcacgagcgtggccgcgctaaaagttaaataggccccgccggccaataaaatgcccacgcccgttgccttagcgccctgcaaataggtgttaagacgcgggttctgttgcagcgcgcggttcactccgtcggccgaacgcacattagtttcgggaaaattttgtttgactgcgtcgccgcgcgtctttttcacgtgcaaacctgcatcgggcacgttatcggcgcgccgcaattgcgtaagcgagttgatttgcgggtcgctaatgccctgaaacacgccgcggatgcgtggcacatcgttactgcgcgtaatgcggttgatgtcgcccgcgctcacaaattgattgttggataaattgtagcccggctcgtaacgaccgttgccaaggttacgcgtgctgggcgtgcttagcacgttagtgaacccggcgggtgtagtagttaacaatcgcgtattatcagccgcaaaagtagctgggttgggatacactttgttaaccctgcgtaggttagtaaagaagctcatgtttacggcttactcttgtgtttcgcgattgttcaatctcgaaaaacacgcacatcttatatagcaaataaaacaatttatattttattaatagtttattattttatttacacaagcgattacatatttacaaaatataattacaatgaattcttaaatttttccattaaaatgttgtgttgttgcgcaaacatttccattttaagtttagtttcggcaatctgtgcgtccagctgactttgcaagtttttagtagctttggttaacgtgttgttttcttcttgcaatttgagcacattttggcattcgcgttgaagttccaaatcttttaaccgcaactctttttctaacgtctggttgtaagattctttcgattctaaaagttgtgttagcttacggtttttactcgtgattaaattgtgatcagtcgtgatcagattgatgtcatcctgcagtttaagccgtttttcagactcgcgttttaattctaaatctttaaattccaactgctgtttaagcatctgattgtcacttttgatcatgtgaacgttatggtgcgcgcgcgtcgtttcagcgcgcaactgtacaagttctgcttgaagtttttgaatagcgttgagttcaatagttttatcggccatgttatctttacgtaaaaagccccaatgtttcttaatagcctctttgtcacttcgtgcattaacggctttgatttcttgaatacctgtctcggtgtacatgcggcagcaatcagtttctctattacagatgctgcacttgtatgattctttactaaaaataattttaagataacactttatacaaacagcatgatcacattgcgtactggtcacaaaagaagaattgcgattttctaaatcggtaaacgaacacgaacaaatgttacacattagggttatttctttttctggtctcacttcttgaatttcaacatcactgtcaaaatccggttcaaattcgtcatcactgtctataataaaagcttcagaattgcgcactggagaataatctggcgaccgataaggtagaatttcgtcttgtatactttcatggaggcgtaatgcgcgttgatgcgcttcatcgccgggttgcgatgaacgcggcgccggtgaagaagcgctgcgttgcgttggagattgggtaggatgccgcactggagatctgttgcggcgcggcgcaggcataggagctgagcggcgcggcgccggatctgggcggcgcaaaggcacagcttcgtcttcgggtgaataactcaaacgacgggccgcgccgctcgaacgtcttgacaatgcgccggcgctaacacgatggcgcggcgtagaaaagttggcgttgatctggcggctcattgtagatgaagtttggtgaaactcttgtgttgaactgtgcttaccagatcgcaacgagctgtatttataggcgttatcaggctccatataaaaagataaatgtgatatcgcattacaagtacaaccgtactcataaaacaaggtcaatgtgttattgaacaatacgagcgtgtgtcaagtcacgtaaacacgttacttgcagatatgaactttattgcaatgcaaaaaaattcacatttgtcctataccctatatacacatacaaactctacgtttcgtagactatttaacttgaatagtctacactgtcgtatacgctcccaatacactaccgcacattgaacttttttgcactgcaataaagttcatattaaattataacgtatttgagtacgtgaccggtttatcttattgaccgatataatgtgatggcgtgaccggcatacggtttatcttatcaatcaatatggttcgagcacgtgactggcgtacgtgactaactggcctacgtgattggcgtacgtgacttgataaggctgatacaaagccttatcgcgcctcaatgcccctataaatacagtctgccgatctcgaaagcatagttcatcagcaacaacagcagtgaacacattaagcagcaagtttaccagtcacagccagctagtcacagctagctagtcacagccagccagtcacagccagccagtcacagccagccagtcacagccagccagttacagccagccagtcacagccagccagtcacagccagccagttacagccagctagtcacagccagccagttacagccagccagtcacagccagacacaatcagctagtcataggcgtcacagccagttagtcacatccagctagtcacagccagctagtcacagccagctagtccagccagctagtttagccagctagtcacagccagctagtcacagccagctagtccagccagctagtccagccagctagtcacagccagctagtccagccagctagtcacagccagctagtcacagccagctagtccagccagctagtcacagccagctagtcacagccagctagtcacagtaagcatgcgttcaactaaactttcgcttaatcgcaaaattgtaaagtcaaaatttaatttaaaaaacaaacgcgcacataattctaaacgcacgaggcgtgacattgataatgctaatcaatacaaatttggtaccatccagccgggcgatcgcaagtacagtgaccttttaaaattaccagacattgtgtggggcaatattttcaaatactcttcaatgtatgacatttacatgtttaaatctgtgtttaatgttaatgttttattgccgcccgttatggcgttagttaaagacccgcatagttttgatatgtgtgataaacgttttgattaccgtgtcactaccattataaatccttgcatatattcttttaaagataaaaattttctagatttgtataacgaacacgttaatttgaccgtgtgtgacaataaaagtaaattaggcctgttcaatagggaatttttaaaccctgaatatgattatattacatttatttctttaaataatatgatagaaactaacatggattcttatgaaattaaaagttattctattaatgtacccgaaaactactcagtggttgagtacacgtacttgtgtattaatgacgtattgtacggaactaggttgctgttaaacaaatttaattttaccacaccactaccttttaattgtataattaaacaatatttgttaattaaatccgatatgattgaagcgtgcgtgttagataacaaaatgcccgttaacggttgttgtgaatattataacgcttatccttacgagtatctgtgtatggataaaaaattaactaaagattttgtatattatcataaacaagttttttattaataaatttttaaaatgttaatttattttttatttagctaaactgttttacaaatgtacctataaaaccaaaaagcagcgctgactaatgtttaaacttgcatttcaaatttatttgtactcgtaaaaccatatcaacaataataatgtaaaacgttttgtttcagaaaaacaggctacaatagcaataaatacaagcaatttaatcttaaaagcacagttcagtttttaccatgtctaaccgatacactccatatgaaagacaacgcaatcgccagcaattgcaaaagactttgctagaatcgtttcggctaaaacctgttacgacgtttggggctacttgcagcatatgtttggaaacttacatgatgcagtcaaacaacatcagcgaatttctgatgccgtgtaacagcagttgcactcacatgttttgttacaagtgtattatgagcatgtacagcaacgtagaaacggctcgaagcaacgtgaactgccccatgtgcaggaaaagtataacttcgtggcaggcgttttttcccaacacgtcggtaagttgcaaatttacaaaaaaaaactgttggcaacgtgccggccacaaagcaatttacggacgctgtaaaaattcttgaaagcagatgcgcgcccacgtctgatgaccttaagtcggctaatactgaagcgcgccaaatgctgcgcgaacaattaaacaatttgaatcaagaaaacaaaactttgcaagaaacattaaatagaaacaaaactcagcacgagattgtttggaaatcatcttgtgctcaaatatcagcgttgcagcaagaggtacaggaaaacaataagcattatgccaatgagttgtgcagtaaacaattggaatgtgaccaggccgaaactaaaaatcgcgagttggaaaacaaaaatcgcgaggtggaaggaaaaaaccaagagcttgaaaacaaaaatcgcgagctggaagaaaagaatcgtgagttagaagaaaaaaattgcgaggtaataaacaaaaattgcgagttggaagaaaagaattgtgagttggaagaaaaaaaccgcaaggtgaaagacaaaaattgcgagttggaaaattggaaccgcgaactgacaaacaagaataacgagcttgaaaacgagctagaaaaaaagaattgcgagttagtaaatcaaaaaccaacatcaagtgccagtttcgagttgcaagataacgatttgctggctcaaaataatttattaaaaactcaattattcttgcaatcacaattaatggtcgtgagttgcaagataaattgcaagcttacgaattgattgttcaggaaatgaaacagcagcttgaagagcgaggtgtatcggtagatatttaattttttttttgttaattttttataagtatgagtaataaacaggctattcttttaacaaattacgatgcgtgttttattttacaccccaccacttcaccaccagacaaaacaaagcctgacaatgacgattcagactcttgcttaaacattaaaagtcaaacacgacttgtgctcaattcgccgcctccggcaaatgaaagtgatgacacggggggatttacaacagaccacgtgcgtaattaaaatataaaatttgttaaaattaatttattaaaaaactgtgttttacaatgttaacatatttgatgagtctactattaatgtcatatttagttaaagaatacacaaaatcacgagcattataatcccgcacatcttttaacacggcgatatcattgtattgctggcggcgtttcatgctcgacaagttcagctcctcatccacaaatttttcaaacggatgcttgccgcctgtcaaaagtttgtaggttagcacgcccacggcgtaccaatcaaacgaacgcgagtaattgtggcgccgaattttttcggggctaaaatattccaacgtgccgtcgtgcacgcctttggaatgttcgcgtttacacaacccgtaatcgcaaaggtaaacgcgatcgcgcgccctaaaatataagacgttctccggctttacgtcgttgtgaacgtatcctgtggcgttgtgcaggtcatttagcgcgttgcacaattgtcgcactatattggccactaacgcgctttccagcgctccttcattttgtattgtttcaaacaaatcgggtgtttgcacgtaatccatcacaatcacccacgcgtttggggtgccataattaaaatacatgttcacaaaattgggatgatctgccattaagtcgtgcacgtgaacttcatcggcgctaaaattgtgcgcgtcgattgtcttgcgcagatagcgtttgctggtggggtggtggtgcaacacatcgattttaccaaaccggccattgatacacttgaggcgacgcgacgacggtgcactcgtcaataaccgtcccagtgcttttaaagttgcgtccattatggatcgccaatatcaatcggtaaagtcttacttgaataacaacgcacacaacgcgatagatgccgacgcgttttttcagctagttgcaggacccgaagcgcacaatttaaaacgcaacctgtttggtcgaacggtgaagctaaacagggcggcgctcttggatctacttaaacttgccgaaaacatatacacggacacggcgtacatgcaagttaacacaatagaatcatcgcgccattttgccacgttaatgcgtatgcgtaacttgttgttaaacgtgcaagacgaacacattcgaaacgtgctggcaagcattgtggcgcgtgttgaaaatcttttgcgttctgacgcggtcaatgacgttgaaatcacagttttaagcggagatttttacgaagaatattccaaatacgtggcacgtcaatacgtttcgaccgacacgttgccgttgccgcccccaccaactccgcctatacctgaaacaacgcaaacgtttgtggtgcctacacctccacccgctcaagcgtttgcaataccttcatttcagcctacacaaacacctccatccgctcaatcgtttgcagcacttccatccgctcaatcgtttgcagcaccttcacctcaaccaacgtttgcagcaccttcacctcagcccacgcaaacaccgtcatcgactcaaacgtttgcagcgcctttacctcctctacccgctcaaacacttttatctcagcccacaccaacacctccaccctttgcggcaccttcaccgacatttgtggcaccctcacctgttactgcaaaatcgccgcaacccacgcgtgcgtttccaactccagaaggtacgttgtctcgcggcgcggctgacgaatttgaatactttgctggaactagcgttaatgggataaacctaaaacctcccgtacctccgaaaccaccacatttatctaaagccaattctatgtttgtaggtgataaaattgcgccgccgtttggtactaatactccgcctccacccaatgctacatcgccgcaagttggtgtaagcatgccgccgccacctgtagcgccaccacctaatgttatgccaccgcctccgccgccgcctccgcctccgccgccaaacatgccgccgccaaacatgccgccgccaccgccgccgccgcttgacgatttgttgttagacgcaatagtgtcagaaccgcgcaaagacgctattgatcgcagcgcgttgtttgacgagattaaaatgggagctacactcaaaaaagtggaacccgtaaagccgccgttggacccacgcgttgacatgctaaatcaaattaaaactggcgcaaccctcagaaaaacgggcaggcttgaaaacgaaaatttgggcaagcccataaaggcgcctcctgcagggattttgggtgtgttatacaacacgttaggcgagcgccgaggcgcgcatggcgcgttgtcggaagaatccgatctacttagcgaatctggcagcggttttgacgatgaccctgatacaaaaaaggctagcaaacgcgatttacaatttgcagtgcacctttataattttgccaaagatagcaaattgttttacaatcaaaatattataaacaaagaattagaaaaaatattgcaaaatgtttccaatttattgagagaaaaacccagaacggccgaaaacgttgaaaaggcaaaaaatagtttacatttgtttagaaaaaacgttgtattgcccgaaaacgaattagacaaacagcctcctctggagctgtacgcggcggacgcgtctaagttttatttacaaatcgaggatttaattttcgcgggccggtatgatgacgcgcgtgctttcatacaagcggtcaacgcgcccgacgacgtgaaactaaaaaatttgttggctattaccaacgatttgtcggcgcc

SEQ ID NO: 8 - DNA, 118584 bp, Epiphyas postvittana nucleopolyhedrovirus
aattctattaaaattggcgttaaacttaaacccattaaagtgaacacaaatcaacctttgcctgaggcacctgttacagatatatcggttattgcgggcacattaaaaaaacgacgtgcaaatattagccagtcggaatcttctagcgaatctaacagttcccaaagctgggatgaagaaggaaacacgcaaacaatcagaaaggccaacaaagatcatctaaaatatgcagtaaacttgtataacttctttgctactacacacgcgtatcgtacaaatagcgaattacctaagctgttagacaacgtgtttagtttgttagatagaaaaccaagatctgttgaaaatgtaaatgaagcaaagaatattttagataatttaaaagaaagggtaaaattgacttcgaaccaattagacaacgcggaagcacagtcattgtacatcaatgacccaaaccaattttacattcaagtggaagatctcatttttgctggccgctatgctgacgcaaaaatgcaccttgatttggctatcaccgaatctggcaatgacgaaagattgcggcgattaaaaaagtttgccaacgatttagacgcagttgttgtttaatatgcgggtccagtgaacagaggcgcgtcaggcgcaaactcttttactttgaacacgagcgacacctcgatcaggatttcctcttcctcaccggagtcagtgccaatgtacacgatgggcttgtaaaagttttcccatattacgcggttgacaaacgattcaaacgagttagtgtactcgctgtgaatgttcataatggggcagccgccgccctttttggctaaactaattctgtattcgttgttcatgcccacgtaagaaggttccacaattcttatcacctcgtggggcacgtaatcgcaatcccatctgagagcgtgttgcgccaagaacttgtagcaacggttggggcgcgtaggacgcaaattaatgacaagaaacacgtccattacctcttgatcgtttacaatggggaagctatcctcaacgaatcgagtccaagtttcacgcagaaactctttgccgctccagttgacaatgagtttcatcgtgtcgggcttgacgttgcggatttctttaaatagggttaatttttgatttttgcccggcccaaggaatgggtcctcggctaccatgtaatgatctagcggatcaagatgcttctcgtcctcctcatgttcaagcagatgcttcttgcgtttagcgtttttaatgacagagcccaagtttttgtaatacttgttgtcgtacacgtaggtgcgaccaatagttggccggtacgaatagtctggcatagttataggaaattttattacaaaagtgctacaataacagcaaattacttatttataaaaataaaacgcaaaataacaattgttcttttattaaacaccattttgtacataattttgtaaacagaaatacatgtgttcaaacattaagccactggcggagaattggccccaagaactttggtcgtcgcacctaacgcaggacagctgcaacgggcactttttgtgaacggtcgtcaaatgttcggggtactgcgacacgttcattgtttcggaacatgtgccgcacattattggcgccgtggcgcgctgtaaataattatcataaatttcgcgaagttcaaattgcatcgcgcttctttttttttaaatttattgttttagtaaacggtcctgttttagctgcaagtggtaaatgcggtccactatgtccttttcgcgcgcgatgtcgtctaactgagcttgactcagcgttgaccacctgccgtcgtcggtgcacgccggcgtcgccgcagcctccaacatgtgacgatccgccgcaatttctacgcgttttaaagccgccttttccgcagattttttcttttttgctttctcgtcggcttgcctgtttaaatgcgcacccacaaaacgctccaaatcgtacaaacaatgcaaatctttgtcgttgtccaacccggcgcccgtttgactgctccagcaataaaacaatttaagaattttctgctcgctgtcttgcgacgcccccattttcggcacaatgttaaaaattgcaaataggatttaaacccttacacatgtttgcttgtgggcacaatttcatgcttttcatttttgcgcaatttgacggcttgtacacgtcttgagatttgatcaacaaatgtgtcacctctccaacacatttagcatccattttgtaaaagtgtaaaagtgcgccaatcaaacacgcacttttacactttgtgcaagtcaacacgttaccaagataacaattgaattcaaaacgttttctatacatgccaccgcgcggaacgcttgcattgcttagttcagccattattttagcaatgcaaagaggcaattttaagcctgttaaacttttatgcaaggtctgcgacccgtcagcgcacgcttttaggcaaatattgcgtttactgcgccgtgcaaactgacgttttggttcggtaggtttggacattgtcaacagagcaaacaaacgcatacccgatatttccacaagttgtcctcgtcgaaacacggtgtatggcgaaagcgtcaacacgtccataaaatcgttgggatcaattaaatacgtttcgtttttcttgatagtagccgtgttcgcagacgggttccacaccgcaacattgtccattttatagtttatcacaaattgtatgctgttccgctgccgtcgttttgattactactgttggcttagctgtgtcagtggatgattctaataaccggttacaatcaaatccggttgtcgatcgtttacatagctcgtgcacactgtggcgcaaactatttatatcgcgtttaagttgctctcggtcgtagtcgtgaccggcgaccataacgggcgcgttattaattctgcgattcatattatagtgtaaagttgcataaaacaaaaataacttaatatggctgatgcgcggtttcttcgatttagtacgcgactcacggaagaatacaaagaaaatgtagtagcgcaaatagatcatctaaccaatttgcgcgcgttgatcaacgccaaaacgacaattgccaacgtgcgccgatttggttttgtagatcgcaatgcgtttgtagcagcctgcatggacgtgattgtgcacacgtacgcctcatctgacgacaaaataactttgcagccagaacaattgtattttagagtgtgtcgattttgtaacgagattgcagacgtaccggatcccgacgatcattccattacgcggtatttgtgcgctgcatgcggcacctgtttggttgtcgacaatccgttgaacgtgtttacagaagacggcgtgcaacgatttatggaaatacaacgcatcaacgccggtggcgaaccatagtttataatgtcaataaatgttgtatataattttgtctttcaattttgtgtcctcgcgccgtttcaaaacgcgcaattgcatcttgtggtgaaatgtttaaaatatttatcatgtaccgacacaccaaatagccggtacgattaagtccgtgtgtgcagtgcacaccgatcaacatgccgggacatcgggcggtaaagtgttttaccacgtcaaaaaacaattgtactacattttcatccggcaatacttggccgggcacgcgaatttttttgtacaacaaaccttcgtcgcgcatgttggcgttgtcgtaataccggaacgtgttggtaagatctattacagcacccaaactgcattgttgtttaattaaattttttattgtccaacgatccaaatcgttagtcacatattcaaacatttcttctcgcaatggcactttaaaacaaataaaattagttccttcaattacgttaccgcaaacagtataatcgtgccatcgatcaggaaacattttacgtatcgtgtttgctatcttgaatacaaagtttcttaaataattgcaaattaaacttgtttttcaagtacgattgtaaatgtaaaacgagttgcacagattacgtcactcaaccaattttgtttttcaagtacgattgtaaatgtaaaacgagttggatcttgatgtttttataaaacgttatatctcagtaaccacagagttatagtttgtcttagcaagcagcaacatgtctctgtcatccaagcttttggtgtacgattattacggcaattctatgtgcggcgtgaacgaacaatacggcgcatcgtatcatttgtacaaaatagtggacgagcacatcaccaactcgtacgtgggcgacgttccatggatgcaccgcgaaattgatacagctcgacaaattttaagcggcgcgctgtgcgtcaacgacgcgtgtcacatgttggatctggacaacactaaagaacgtttggcaacgtggtacaagtgcggcaatacaaaaggagtgtgccatgaagtttacgttgttttaaaagccattgatgcattagtgccgattgacaaacgcagcggtggtcaatttgtggatgtcgacacatttgatacaattttgttgaatatcactaacaagttgccagaagtgttacatcaatatttgcggtttgtgtattatcaaaaattagagcatgttacagacgtatttaatcctaaatcagacaccgttggctggtggtataacaaattttgtgtgctaacatacatgtacagaataataaacaaaagtgtacccgctgaattgttaacacgtcttcaaaaagctgttgttgaatatattcaacccaatgccggcgataaatacaattgtgctgaagtgatggcaaacgtttacggcagattttgcggcattggcaaacagcattttgcggaacacaaaactgcaaacatgcacattatgtttaaaagcatgcgcggtcaaactacgatggttgatgagcgctataaaagttttagcgttataaaagattttagtcgacattgcaaggaaacgtatttagatttaaaatcgcacgttgactcgttatatatcaattgtacgacggataaacaaaaaaatgctatgtttgatttattgtgttgtcaaagtgaacaggaccttgatgtagactgttatgattatattgttaatatgttgttttttaaataaataaataaatgaattaattatattatattgttttttaatacattattataagcttcggctactgtatttttatcttgatagttgttgggtttgacagatgccaaaacaggtgttttattagctgtatccgttgtaattttttgcaaagcgggtaaagtagggtcaattttatattgattgcctcttagtggggattctaaaggcacacatttatatgcaaaataaactggcggtgctcccttttcacaacgcgcttgggaacttggatcatttgaccacacattgatcggttttaacaaggtatcttttacgttagtttctacattttcgtgggtgttgtctacatccataaaagaattgttagaactcatgttaaaattttttattagcttataataacattatttacaatatctttagccgcgttaatgttacaatcaacttcaataacgcggcgtcggtttgacacttttttaattttgtaaccgtttgaaatgaatctatctttaatgcattgtactgccatttgcgggttgggatgtacagtttcaagcattttatgcatgtcttcctcttcaaattcaagtttgcgtttgcgaaaatattcttcttgacctcgagcaaaaccaatttgagtgttaccacgttcttgatttacaaacacagccaaatgctgatgtttattcacatcacgcggaaaaatgacgccgggcattgttggcgcgtccggtacgcgttcaagcgtttccaaacgttgttccaattgttcaaaacgcgcgcatacttggttttcaaacaatttgtgcgcattgataaacttgtcgctgttcacgttcaatgttttaatatgctttagcacagttttaatgttgtcacgcacatcatcgcagtcgtatcctttgtcagtttttatggctaacaacacgtcgtctttgtattcaaaagaaagttgttgcaatatttgaatgagtccgtgcttggtggcgtacacggtacccatggagtctgggctaatttcaacaggcggcgttttaaatacaatttcatttagatggcgtacgtgttttgaatcccatttgcagttcaacatcaattcgtggtttatttccaatcctttgcaaaagtcaacaactctgcaacaacgtccgttgtcgtcatcaatcacgtatctaaacttgaacgtaaacgggtggcatttaaacacgcttcggttaacaagatccgattgggctcgtcgatcaacggcgtactgcttgtagtcctgcgcgttaaaatgattagctagtgggtgatgttgctgatgctgctcgttgaagctccaccatccgaacatccagtcgaacatttttgaattttttccaacaattgctgggttatacagcgcgaaaactgggtacccttatgattatagctgaacggtgcgcgaatctgcttagtcggattacaaaacacgtctttgtccacgtctggccaaaaatgtagtatcagttcgtctggtttgctggactgtaatatttgatcttggtacatgttcacagcacgctgcatgcaatgtgcaaaactgccattgcgtatgtctcgcatgttcaggcgagtcggcttttcaaatattctataccagtgttcacgcacggattttaaagcacctatcttgaacccgtcggcaaacttgagccacatgtgaaaacctcgattaccgctaaacatgatgcggtgcacgtgcatttcggtaaaaaacaacaagagtgcagtagcgcccacatttatttttaacatcaactctgttttgttaacgtaatttttaaaatcagcatcaattacccattcgcggccgccttcgtccaacggtttaacgtgcacgtcactcaccgaattgctattaataaagtttagcaattgcaatgcgttgtcaaaatgccgatcaacgtgtatccatcgttgtttcaatgtcataaaggcaaacttacggctgttattgtatgcaattgaattccacattaaattaacgcggtccaacgtgtacatgtaagtcgccatgtgggtcgcctataaaacgaggttacggctatattgagcacacacactgtaatttgatttcgacaattgcaatgcactttgcagtattattaacgttgcttgcggctcaggcccacgctgctaatattctggcagtgctacccacaccggcttatagccatcacttggtatacaaagcgtacgtgcaagcgttggcgaacaaatgccacaatgtaactgtgataaaaccacaattgttaaactacgtcgactccaacgcacattggtgtggccacattgagcagattgaagccgacatgtcgtctgaacaatacaaaaaattggtttctagttctggcgcgtttcgcaaacgcggcgtcgtggctgatgaaaccaccgtcaccgccaacaattacatgggattaattgacatgtttaaagatcaatttaataacgttaatgtgcaacaatttttattatgcaaccgcacttttgatgttgttgtagtggaggcgtttgcagattatgctttggtatttggacatttgtttcgacctgctccggtcatacaaattgcgcctggctatgggttggacgaaaattttgacaccgccggtgccgtggcacgccatcccaaatattatcccaacatttggcgcagcacgtttgtcggcggtaccgccggggcgttgagcgaatggcgtttgtacaatgaatttgaactgttagcgcgttactcagacaaattgcttaaaattcaatttggacccactactcctactatacgtgaattacgtaataacgtgcaattgttgctgctaaatttgcatcccgtctacgacaataatcgaccggtgccgccaagcgtgcaataccttggaggtggattgcatttgacccaaactcaaccacagaatttacaaaaaacgttagagcgccaattaaacgcgtccgtcaacggaattgtgtacgtgagcttcggatccagcattgacaccaaatctattcacgacgaatttttgcaaatgcttgtcaacacgtttaccggattaaacaaccgaactgtgctgtggaaagtggacgatgcggtagttgactctataaaacttccacctaacgttataacccagaattggtttaaccaacgcgccgtgttgcatcacaaaaatactgtagcatttgttacgcagggcggcttgcaatcaagtgatgaagcgctccacgcgcaagtgcccatggtgtgtctacccatgatgggcgaccagtttcatcatgcaaacaaactgcaggaatttaaagttgcgcgcactctgaacactgtcgacgtgtccgcatcgcagctcatactagcaataacggatgtaattgttaacaaaaaaatttatcaaacgcgaatggccgaattacgcgccgttatagattacgatgaaatagcacctgcagataaagcaatcaaattcacggaacgagtaatcaaatttggacatgacatcacttacccggcgcggtctcttaaatcaccagccgccaatttggatcaatcaaattattttatatcttttcctttgtaacattagtcagtgtttttatgaataatgtgaatcacgacaattacgtcaataaatataaaacaaattttgttttttccccgcccgcctactgcgcactttcagcctttataaacgctcacgttccaagcgagtcattattgtcgaacagcctttcaaaggcgcaacatcatcgcgggttcacatggaaacaccaaaaatgttgccgtcatcatttgccacacccaaacgtgcggcgcttggcacatttgtgaaaactgtagtcaccaccactacggtgtcggggcgtggcttaactcgcgatgagcgaaacagaatatttcaagtaatagcccaattacgaaaaacgcggctcagttttactaaattaactcaactgcaaaaaaagcgcgtcagaaacatgcaaagacttgtgcgcaaaaagaataatatcattgccgatttggctgcgcagttggaaagacggcgttgccggagcaaaggcagcaaatattttgccgtaatatgccaaaatggcgtgctcattacaatcagcggatccggccagtttgtgcgtcagcgcgttgcaaatatgtgtgcggttggaggggagcaaattttttgtgagcgccgaaacgattgcgcgcgcgaccggcaattgattgcagaagcgcttgcggcttctttgggctcggatgtgataacgagcgccgctaacaaacgttttaaaatattaaacgtggaaaaagttgtaaacgcaaaatttattgtgcaacaaacgttgcataatggatttaacaattaccctaatacccattagtttaaaaaacattgaagaaccaaagcgcagcgaatgctttaagctgacgtcaatgcgcgaggacgctgaattttgcctaaacgtaaaatgccgatcgccatttgccaaatttaaagtattaatatcaattactaattttaataacgaacatttgcaagccaccgtgtgcagccaatacgatagcgtgtgcataatgaacccatgcagccaacaagaaattatttttgacgggtttataaagcacgacgacgagggggtcacagtgccgtttattgttggaccattgttttctttgtgcgaatccgttgtaatgccgcacgtgcgcgctacagtggacgctattgaacggttacaaacggttttaaaagtatttattaacgaggcttatttaaaaggagcgcgaacaacgctcaaaaagcttttatttagtgataacaatgaatctgatttagttaataatatagtgaattttattaatgtagataaaattgagtgtagtgaaaaatatgttaatgttactaaatgggttcctgcaattaactatgtaacgggtaaacaattgttaactgtattatttatttttaaatttaattaatgttaaataaaatgcgtattgacaaaatatttttttatttataacaaatacataactcccataaattccctccacttttgttcacagctttgccggttatgcgggtagttggcatagtctgccacgtaatgtggtatttgattcaaaaacgtgttggttgtcaaataagcgtagactagtttgcggcatcccaaagccggtccatagatatctagcgtttttttgcaaaaacttgtaatattttcaaatcgatgcttgccaacggccacgtcgctgtgattgttgacgcacacgtcgcacgcatcttgtggcagttttgcaaataatgctcgtattagagttttgcggcgttccactttaaattctaatttgtcagtaaaaatatctttcaacaaacacatgatttgatcgttgagcacgcgatgcagtggtgacaccaacacatgataattgtctccaaacatgatgaactttttgctgcaacgttctccaaaaaaagggtgtttcataacgcgcacattaacaaaaaacacattaaatattactgcgtggcgtttgttaatcatcaacttttgattgttgtattcgtcaacgccgttttgcgtccacatttctacttgcaaagcaaaccgaatcagatcaaactcattgttaaaattggtgcgcacagtatctatgtgcggcaataagcgcaaatttacgtcatcattaccaaagcaatatgcgccattctgaaaacattttaagatagtcaaaggactttgcattcgaatgttggctgttaattgtgtcaaattgtcaaaagccacatccacgcacgcctgtaaatgtttttgcatttgcgctaattgcaaccattctttgctacagttgtaataatcaaaatccaaacattttaacatgtcgcgtttttcatcaatatgacaggcagccgccgctccgccgctcagtacaaacaatccgctcttgtcagccgttacagcttcaaaacaatctttaaaaaatcgcaaaccaattttggccgtaatcttattgcggagacaatcttcaagatcccgtgtattaacataaggaagtgttcccgaacaaacttgatttgctacgcaatccattgtaaaatgaaattaaaaacacgtcctagttggacaaatgcgcgcgcgcaacagaccgttttaagattggttacttcaaatcacaacgtctattgtgaacgcgctatcgcgtttgtcacctcggttttgttaaaaaacaggtttaatcatgttacgttgctaaacttgttggacacaataattaatttagagcgcgatatgtttaaaaagagtctagttctaaacggtcttgttaacttttgcattgcacatggtgacggtgtaacgatgcaacatcagcttttaaacagggtattgggaacgttgctagaaaaatactacaaataatataataacattatacaatcacatttaatcacatttaataatacaattttttggtcaaatactttggttataatactttggtaggttgttattttaaaagttaggaagcggtggcggcactggtacgcaacaaactcgtattggcttgcgcggaacactatacaccgggcgtggcacgctgtattcataatcaccgaaaaaactaaattgcacaccactgtcgggcgacgacgccgtacccgttgttgatgagcgcccttcggtcattacttctaataaacgcaattggctttcttcctcgtctgtggtgtaacctccttcttcgttgctttctactgcaggctctggtttagtgcgcatttctttttgttgcacgtacatgttccaacaaaaaataattataattgtcaatgtcatcatgattagcgcacttggattctgattaaatacagttggctcatcgtgttgcacttcaatgcgacacccaatacatttttttataaaattatgctggtacacacaattgcgatcggtgacaatggcgttcgtgtcgtgcgcgtcatatttttccacatacacgttgctccagcacaaagaatctaggtcgtattctctatacataacgtcaagcacgggcacgtggccgtgttggtagatttgaggttggaatatgacaaacagcaaccagcagattaatgccaacacgttgacaactattatcacacttttaatgtaaaagtcacatttcatagataactttttaaagtacaaaattattttgtacatgtagtaggtaatggcgatcagcacgtacggtccccacataaacgccgtcagcaacgaaatatttagcaccgatactccgtcgtttagttccaacaaaagcgcatatttttgattaacagtacccattagcgagaacacaaacacaactatatgcactgtgaacatgattatgttcaatagtaattgcaaaaaataatttatttgtgacaacatgttaagtattggcagcatgtatcaaatactgattgtgcttttcctgttcgcgctgctttatatagtaatctggcccttttatcaagcctttgtgtacattaaaaacggtcaacgtgtttacaatgacactttgaccgataggatggagtacattgagtcggtcatgagacgcaggcattacgtgcccatggaagcgttaccctcaattagatttgacaccaatttaggcacgttagccaatgatagcattaaatgcatgtccatgcccatgtacgtaagcgacattgatttgcccatgtttgattgcagtgaagtgtgtgataatcccaccgctaattacttttttgtaggcgacggcgacacgtatgtggttaacggccaaaagttggcggtgggcggctattgtagtacaaacagcgtgccgcgcgattgtaatcgcgaaacaagcgttgtgctaatgagttttaaccaatggacttgtattgccgaagacccgcgttattttgccggtaccagcaacatgactcaactagctggtcgacaacattttaatagcattatgcccggtcaaagcgatcgcaacattttattcgaccgactgttgggccgcgaagtaaacgtggccaccaacacgtttcgacgcagctgggatgagattttagatgatggtacgcgacgatttgaaatgcgttgcaacgcgcgagacaaaaataacaacctaatgtttgttaatccgctaaatccgctggaatgtttacctaacgtgtgtaccaacgtaaattacgtgcacactagcgtgcgtccggtgtttgaaacgggcgaatgcgattgtggcgatgaaacaataacgcgtgttcgacatattgtacataatgaccgagcgtctatgtgcgccagcatcgtggacggtttagacaccaccacggcgtcccacaggtttcgcgttgaatgtatcaacacttatacacccatcgacaaattttctagtaataaacttttgtgtccaagcgacacgtttgacagtaatacagatgcagcatttgcattcgaagtacccggttcttatccgttgtctggcaacggaattgacgagcccacttatcgatttttcatggatacccgatctagggtgaaatacaatgacgtgcgcggcttgatcacgtaataattttaaatttagataaagctaatagaatattacgataagcattatttatgaaattacaaggcttacgtgcctaatcttatcttcttatcacgtacagaatcttatctgttacgtgcctaattttatgtttttatcatgtgcctaatcttacgtgcctaagcttattaatgttaaagatacgtaaaactatttaaatttattaaaatgttatgtatttaaattttaattgataacatttaatctgatccgataatagatgagtgcgtcataaacagggtatataaagcgcgcacgttggtttgcatattcagtcgtgaacagatcgagcaacatgcattgcttaataatttacaccgccgcgttagttttgagtggtactagtgcttctaaagtgattagttttgagcccatcaacgatgcttcaggccttttgtttgagcgtatagccgccttgcgccatgtgtccgacgaacggtttgtgtttgtgaaaagtgttgactttactttcttgctgcaagaattggcgcaatacacagaatttttaactaacaaacgcgccaatgccacaacttgtgctataaaacttatcaagccccacaaacccatgtcgacaaaaaatcgtataaaaaaagacatcgcttctatcaaacaactagacgttaatttttacgaaattgattctaatgacatgaataatgaagtttttgatgatgaagtggactttaattacattgataatcggcaggaaaacgttgattacgataacacgcacaatgtagcgcattggacccaattaaacatttctgaggccagaattttgttaaataatttaacagacaaacgcgttaaagtgcttcctacggttgttgctgttaccaacgcgtcagatataaatttaaaaaaatgcaaagattgcaacactatcgaagaagaatgcgcatatttgagcgacacatattcgcgcatcagccgcaagtttgtcattgccgctgcgtttgccaacaccttggaccggttaataaaacagacaaatcgtaacaaactaaattataccaacaacgtgttaaacgacactaatttacttgcggaaatgcgtcaactagttcgaatgctaaataacaaaaattttagttggactgtggattttgaacgcgaaatgaacgcacgttttgatttgtcgcaaacgtacaaacttcatttgtatgccaatcagaatgttgtggtaatttttgtaattttaccactcgttaaattgcccacttcagtttacagtttgtacaaagtggtgactgtgccattttgcagaggcacaatgtgcttgatgatggtgccttcggcgagttacatcgccgtcacggacacgcgcaacttttacgcaccactacccaacaatatccgcaccgtgtgcaaggagtttactggttacgacgaattcctgtgtcctgaaactactcgcattgccaccatggaatcgggcgtgtgcgaaatcgaaatgtttatgggtcgttacgcgagtgatattgatacgttgtgcgacattcgcgttgcggataacaacgctaaacaagtgttaatggacacgttagttgtcggccgcaagtggttatattcgtttgctaaaaacatgtcagttggctgtttgtgcaaccattatcccatggacgtggtggtgtctgtgccaccgggtgtaggattgataacaacgcaaccgtctaatttttgttcaatacgcattattaacacgctaatattgtttaacgcagacacacaattgtatgctactgaatcaattacgtatgaacctcgtaaacaatttgattacaataactatgttgatggctctttgttaagtcagacttctaccccgtttgccgacgctgtgaccgatctaactttaactaaattgcgtttgttacgatctagatttcacatacgtgattacacggcgccaccaaaaacctttttttcgccgcacaacgatttgccacagcctcgtccggatatcgtacacagcaataatattgtaattgttactataattgtattatttgtatgtattgttagcgcattgtgtgttgtcatgttttattgcatgtatagacgtcattgtttcacagcaagacacaatgaaattgccgttacgtttagaaacgacgaacatcaacctattattactattaataatgacacaggcaatcgcgttaacattgcagttcccaacaatttgcaaaaagcagctatgtttcccatgcaaattaaaggtaacaaattgttgaactaaatactacattggaactaaatactacattgaaaccactgtattataacctatatgattattgtaatataaccgtgtaaccaattatgtaaccattttttattattaaacttgtaacctaattttattaaacttgtaacctaattttattaaacttgtaacctaacttgtaatcaattaccactatgtaaccatgatttaataaactatgtaaaaaaaggttttgttttattacacagcaataggtatgtagtttgtaatatttgcgtagagtgtgtacacgtgcacaaattaaattcgtaagtgttaatgtgcaaaatgcgcaattcagcaggcttgttcatgatcatgaaacccgacaaagccgtgttgttgtgtgcgcggcgtgcatatcgcaatgcgcccatgacaacacaggacacatttttagaaaaaatttccataccccgcggacaccgcgactgcacggacgctaaaatttacgaaacggcagtgcgcgagtttgtcgaagaaacgggtcgcttctttcacagtgcctatatttacaaatttccgttcacgttgcattggacggacgacggcgtgacatacaaatattcaatttacgtgggcgttgtgcacggatcgcttgccaacgttaaatttaaacccaatacctacacagtaaaattgttaccgggcacgtttggtaacgattatcgcattgtgctgcgaccacgccgctttaattgtgaaattgttcgcagcgtaactattgtaccgctcaatcaatactttgattacatgaccaacaaacaactcaacacttacgcctctagcaattacacagagttttttaaatttgtcatacaagttaaacaactttttgataatgaacaattgcgcgactttttctatgcctcactcaaacgcgacgaaccacacgacgttaagtcatcccgtttgtaataacaatgccaattgttttacacgcagcgaactgtatgctatttggagcgaaacaatcaacacgctcaaacgcacttttaagatcaaaaacgtgcacgcacatatgcttgaagatgattccggtgaaattaaagattatataagagcaaatttaagccgctttacagtaatcactggcaaatgttcgaagcgtaaggtgtgccatcacgacaaacggatcgcaagaactttgcatcttgaaaagaatttagtagacgaatacgcttgttcagtaacacacgtgtattccgcgccaaaatggtaaatttagccgaaaccattcacgacgaagtgtttgcaagcaacaccgcgttactagttaacaaactggaaactagcgtgtttaacaaatgcaatttggactatttgaaaacttgcatcaattttttggaaaagaaaaacatgaattataccatggttgttttgccgtgttcgggtgacgaccgtaaaacagtgaagcgtcctaaacgaattagcaatcacaacatgtacatcttgtttaatagtttttacactaaaatccgcagacccgaatggcccaacagccccgtcatgtgggacattgtgaaagcacaaaaggagctggcaaattttgttttagtgtttgatcacactcaaaagttggggaaaaaaattactagtcgctccgcgtccagctcgtcaacggaaaccgcgccgggcaaacgacgacgctctgcaattattgccaacgtgtctgagatgcaagaaaattgcgatttgcgcgacaaattgtatgctgaattttacagcgtgcttagtgaaacttttaacagtggtgtcgcgcctgcagccagtagcatttatgacaacgtcattacgcgcgaatttgtcactaaaaacatggagttgtttaaaagcattgcgctaaaattgccatcatcggctagctacgttcctacgccgttaccgaaaaaacgtcgcgccccaactggtgtggttaaaaagattaaacaacgccgagacacaaaaacaatgccagtgtatgccagtgacaacacccaagacaccaacatgtcagagtaataaaccgatgtatgttcaatagtttaataaaaaattaaaaatacattttctttttgttatcctccccgtagtctaagtaccatgtgaagtgttgattctttttgaatgttgtagtcggccattgttttacaatcttccaattgtttgcccgcatagataagtctttgttgatccacgggcacgccttccttatcggcaatttgttgcttgacctgtgcaacagtgtcaccgggctcggtttcaatggtgatgcttttgccggtcaatgtttttacaaaaatttgcatttttaaactcttataaatggcttccgcgttgacaacagcgccggcgtacaagcaagacaaatctttgcgacaacaaattgttatgttaactcaagcgcgcgctaagcgcaattacgaacgcgatcttggtcaattggtaaaagaaataaaaaagcgcggagtaacaaatggtcatttaggtgacgtgcttgagataatgggtaaacaaagtcaactattaaccgaaatgcaaaaaaacgacgacgagtttcgcatcgtgcaacagcgtgacttgagccaaaacacaatagattatttaaattgtttgcaaaatgagaaacttttccattgcaaactgtgttactcgcacgccgactggttgtggtgcgagtttcacaaaacgcatgcgtatcgcggatctcgcgacgtcaatgtcgacgcgtacgttgaacacataaacagcgatatgggcatagtatcgtttgttgaagaatattaccattatttgtcatcaaatgacggcaaacttgaagcgaaacgtgttttaaagacattgaccaattttgagtcacttaacgaacttttggctagccataattattctgcacaagacgcagacacatccgtttacgaattaatggattttgattaaacttgtttttaaagaacaatctatcgtgtaaacccacttcattatattacgtcatgccacatcgtgttttacattttttgttgaaaatgtaaaacacgtgtgggatgatgagtcatttttacaatcttgtttttcgagcaccgctgattgtgtaaagccagttgagtttaacaggatgttgataacatgcacattataaaaggcaaacgtccgctgcacatatcaaaacgcaatatgcattgcctggctttagtcgtcgcaattttggcttgcgtgtgttgtgccgaaaagcaattggaccatgttaccggaactcgacatcttgtgcaagtgtttgtacacaatcgctatttggctgtgcgactcaacggcaccgtggaaggcaccgaagacgcgtttgatgtagacaccatgttgcaacgcgtcagtttccgcgacggccgcattttgttacgcaacgccattacatgcatgcatgtgtgtttggatcgatgcggcgttatgtacagtactaacgccatgtcttacgattgttttttaaaagaaaattacaccgaaaataattacagtgtcatgtataaaatttataaacgcaaacgaacctatgttgctttgaataatcgtggtcgggctcgtcgcgtacaattgccaatgcgcaggacgttgcgcaaaatgagccaatacgcgctacttttactaaaacctgtaaattacactgttgttgtacagtgtaataaacttaaatatatcactaaacatcgccaatgtcgcgttaagtaacatgttttttaaaccattgtgtattaataaatgtttatcatgattttttaatattatttacctttgcctttaacattaacgaaataacaaaacattattgtgattaaaaattttattaaacttgatacatgcggactgcgttttgtattttaccacgacacgtagggcaacgacttacagacgccgcacatttggcacaagccactacgtgaccgcatggcacaaagcatacaattttttcggcgtcgtaacacaccttgcatatgttactttcaattatttgttgctcgcaaacgagcggctgttcaacgtgttcggcttcgccgattctatcgtctttaatcacgcacgctttattcacaacattttgcacataatcacgccctttgacaagcagcaagtatccacagttactaaaccaacgtgcgtgttgttcccatggaatgtcatcattttcccaatctttaaggccgccattgcaataaaaacacaaagttttatcaccgcgcgacgtataataaaatcccgcttcggccaattcatcgggcctttgcttcatgctgcgcggccacccttcaaaagtttttaaacgcgcagcttctgatgcatacttcggatgtttaggtccttttaattcaacttgcaattcgttttgtttgtgtgcgttgcgtattaaaggacaatgcggtgcccatttttggtgatctttcgccgggtcgtcgccttcttgccaatgcataatttccactttgcaaaacgcacagcgcacttcgtcagcgcgccccaaataatagaacccgttggtcgccatttgctcaggtgttaaaaatgttacgggccagtttacaaaagtggttaaacgtacggcttcatttttcatatcattcgtagtgttaaacattgtttcaaagcctgtgggcgcttgtgcaaaacctcgctattcaaacttaaagtttaaatcatgtacactgcacatcgcacgcctgaaccggaatttcaattgctaataacgtctatgttggcgtcgctgccaatgttaacgctgctgttgtgttcgccgcaatttgttagtcaaaattgcgtcacagttaatggcgcgttagttaacgccaccctgcaatctaccgccgccgtgcacaccactacgcacactgtttgcgtgacaatgaccgcgattgcgttttcgctgggattgctgacgcacacgctgaagacgccgcgttgtaccgccgctttaacccttgtgacaattgtgttttgtatgaacatttttttgattgtggcaatgatcaagttttgcagccaaccaacttttaatggtggtcagtttattgcaactcgttttgtctccgcttcattcgacaattctacggcggtgtgcgtgttatatgccgtcactgtgctaagcgtgttgcacgtcacgcgttggctcttttttgaatggacaattttgctagaacgttgcgaactgttagcgttcgcgtttacagccatgataaccattacgttgtacatatttgcactcacattagccacttatgtggttccgcttaatggtttgcaaatgtttcgcaacgcctcaacggtttcattaacaattttattgcctattcaatgaaataaaacaaatttttaatttaatacatttattacataacaacagctatagttttactataaaaaattcccattttaattaatatttcgacgtttgctttatccaacttgtagtaaccttctttaactttatattttgtgagatgcttcaattggttggctgtgtacattgatgcaaactcgtacaactgtattttaaacattatcggcatgtttttttccattgtctgcgactcgtccaatgtggtgccaatgtcgtaaatgtcaggcatttctttacgggcaatgtagtaatacatttttgtttacgtagtaacgtacggttgtttcgcttcacaaattcaatgtgttcatttatatatcacacgttgtactgtaaaatttgtacagcaacttgtttaagttacatgtattgttacgtttatacgttttcatcaacatgttataaaatcgataatctatttttgtcacaaaacactgaacgtatatcacgtcccaatgttttaaaacgatatcgtgatcaagtttacgaatgtgttccatacgaagcatgccgacatattttagacactcgtgcgttgcgttaatacaaccttgaccatcaacaaattcattatcgggtacataatttttgaatgtgcgcaatgaaagatagtcagtttcatttggaaaaattgttgacgttatgtgatacggcgttaatacgctgttgctgtacatgttggcccatttcaaacacaagtttttaaataatcggcgttcaaagattgattgcgcgaccgcaaacccgtcacattttaacaatgccgcaaacgcaatggcttgcaaagaaggcgtttgtttgtacggcatatgaacttgatttaaacgcactttgcagcgtttgacagcaacagtttttgacatggtgtgttctcgtgcgctactccgcgctattaagcaacacgactacgcgcacgttataaatttggctttaaaaacgcgcgctaaccgcgagtatttactcgggtgccaagatgaaaatttttggaacgaactatcgcgcaactgttacaaccgcgaccgatttcttactgcgtttagcgacaaaataaattggcacgaggtgtcggcccatcctattacaattgctactgctaaaacgtttgttaaaagattagaatggtccgttgtgtcgcaacaaacgttattaaaacaacagtttatatacgagttgggcgaacatttaaacttgcagttggtgtcaaagaactacaacaatttaacgttggcaattcagcaaaaatatgcagccgttttaaattggaaatgtatcgtgtttagtcacaacatgttgcctgaatggtttgaaaacccaattgctgaatacatagattttgattctgtttctaaacacaaacatctcaaccgatattacatcaacacgccgcattgtattaacaaaattaatttgtctgtgtacatgcaacagcccaacaagatcaatgacttgttaattatatattgtttgcgcgaaggacgcgtaaaagagttgaaagcggcgtccgcattaatttcatgggctaaccacatgcttgtgtttgaccaatacccggcgttggtcaacacgttgtgtacggattggatcactgtcccgacgtggaacgccaacagcgcgccgccggcatactattttcggcatttattagtgcccaacacgtttgagaacgattttgtaaacaccacgtattgggacaagttcattgaatacgcgaccaacacgcaaaatgttgctagcgccgcgtttgcattgatgctgtttgacaattttaaaacgcgagtagactggaacattttacaacttagcgaccgttttgtaaatttacccgtattgtatcgcactaacgagccgcttgtcgcgttagacgcggcgcgcaatgacgaaaaagtgtggcgcgcgtatagtgtttttattaacgggcacggcgcgcagaacatgaataacatcatacccatgaatatgaacgtgcgcgacgcgtactacactatgactttggtacaaccgtgtgcttctcaacaagaacatgacaaagagcgcgtttgtgaacgcgtaatggcacacaacggtggagaggatgcgctattgaattggaacttgttgtccgccacacaaccagtatgctgttttaatttacgtcatttgcaaaatgtcaacacgcatacttaccgacgcgacaatccacatttcgtacaagatgtgtatgacaaaatggtggccgcccagatgaatattaatgactttctttgagataaaagaaatgagttttctaaaaatatccatatctggtaaagatgtcttctaaagatggcaaatctcggagtctgactcaacaattagattccattaacagacaaaaacgaaaaattgctgcaaatagccaacactatgagagaattcacaagttgaccaagaacttatccgaactacaggacatggaaaaacgggtcatggattgtaggcaaaaatttctcaattatggattaaaaaacttttaataaatatattttacacaattatcggttttatttttaattatcgtcatgaacagaatcaatttcaccttcttcccggtcatagccgtggcttttagcgtaactttctatgtctgcatctgcaacgcacggcgtgttgggcggcgagtatgacacacgccgtcgacgtatcggcgagtgggacatccgccgacggtgcgttggcaatcggcttggccagcacacaaatctttcgccgtttggccaaaagtagcgatcactgcaatgtagcaagcgatcgtacacgcgtctagaatgaacgcgcaaacgccgacgagagctgcgtcgccaatcaatgcccatcacggtgtcacagtgcggaaacacatcggcgcacattaatgccacaaaatggcgggtgtatcgcttgttgtacgtgtgcccgttgtaatacaggtccattttatcacactacaaatatttttacaaaatcagtcacgtcttgcctgcacgttgggcatttgttgtctaacgcaaagtaacattgcatacacacgcaaaaatgtcgacacggcaacagcacagtgtcgcgctggcgttcaagacaaattttacattccatattttcgtcgttagaaacatgttctaatgcgacaacgctttgtaaaggcgctaattcgtcgcgttgacgaaccgcattgcaaaattcgtcacctttaatgcatactacaaaataacattgcgggttggcgatcgcgtgccgttgccaagggtcgtcattcggtaaccaatcgcgcacgcggcaatcacaaaaaaagcaagcggtttcatcgcctaattttgtatgaaacatgcccgcttccgaaatatttgctaccaagtgttgcaacgcggccggccaataatcttcgaacgtgcttttacgcgcgtttgtatgagttaaacgactgtacacgcatataggcttgccgggtgttaccaaaaaagcgttagtgcttaaattgttagcaaagttttcattttgcgctatcttgttggcatacacacaatacggtgacagcgtcgcgtgcacaaactcgacacaatcatcttcgtgccagtttttaataacagcgctacaatattcacacattaccgcgtcgtcaacgttctggtagcgaaacccgttgattatcaaactgtttacgaacgcgacgttgtcaatggggtaattttcaaaagagttgtggcgttcgataagcacgttaaaaacatgttcggcactaacttcgtgtgcgttctcgcacacgttgataatgtataacggcgacgtggcgctcatgtagataacgtaaccgaaattaaaagtcgatcgctttgatgcaacgacacgttcatgtggcccaacttggctcgcgtttcggcgtttacgacgtacacagtggacaaatcgtagtcaagcaccaccaattcgtaatctaacacgttggtaatgtagctttttttagaatcaatcttaaaattaaatttttttaactcgtttaacgtggcagtgtccaaggttttgtcaattacgccgttgcttaaatgtttaaggattgcgtagtggtgcaatttgaaaggcgcgcatttgaccgagttgaaaggcaaatttttcaataaatcttcagcagtaaaagtaaacacgccttgggcgcgcacgtctaccgaaacgtcttccatatcttatatatacttaatatttgaaccgtaacatttagtattcgtacattcagcatggcttctaaacgcacgcatgccaatgacgcaggcaaaaacgacgcaaaacgggtggcgcttcaagaatcggacacccaattgttaccttacaacggaagcggatttgttatgaaaattgaaaaggaaggaatgttacgtgtgtttacgcctgtaaacagcgtacaaacgcaatcgcaacaatgtctaaagtggcaaaatgtattgttgtttaatttgcaagagttaaattttacaataatcaacgacaactacaacgatttgcagtatttaaaacacaaattcaaggagatgaaaacgttgtctagctattatgaatggtgcaaggaagaactgccagaaaacaacatttctataatggaacctttagttggaaaatgcacgtacacgattggccgacgtgttaaaggacgcccaaacgggttttctatagcggaatttggcactgttaaacggtcaaaaagcaattttggacagtttttgagcattacgtggcccgctattcacgatcacaacgaagtgttcggcaacattatggacaagtattacaaatacgaatatccactcaaattagagtctagcgtgtgcattcatttgcccgaaaaggaacatgaacgcgaagttaaagctcgtcagtttttagtggtgcgtcgctcaaacaacccagaactgtacgcaactggtgaattgaatcggccgttagaagtggtaccaatgagtttggaagagtttgacactttgtttgaaattggcaaaactgatggcccgtctcatgaagtgcccgtgttgctttgtggctgtatagacggcgtgaaatacggaaaggagattcaattgacggacgtgaacaatcgcaagtttagcgaaaaaccatactcattggcttttaagcccatcctgtttattgtacttgagccttagtaagttacaaaatggagtgtgacctttctgttgtcataaacaaaaatcgtgcaatgttagacgttgcgtttaaacaacaaagcagaaaaattaaaaagtactttaccaagccttgcgatgacgaaattgaaaaaatgttaatactggctgccgacattaacggtcaaattgaagagttagaagcgcttttatacattgttgatgcgtctgacgaagaaacaatggagtttgcgcgtgattgtaccgatcttgacattgaaccacgcattttaaaacgcatgtgcgcgcgtaacgatttgtcatactttttgaccaaatacgacgcaactaaagtgttggtcgccaattctttggcccacaatagttttttaaagcacagcgagcaattcatcgatgccgtgcgcaacttggacaccgccaacgcagctgcaagttatttagctaaacacaaatgcgcagctattaagcatttgtgcgctttggagtatttggtaggggttacaataaataaaaatacaaatgaaaattaatacttgttttattccaattgtacaatcctttgaccgtagtgtgtaccagtgcgcacgcgcttgccccgtatataatcaatgtttatttcgctatcacattcgacaatgcggttttgttgtgcagctcgtttaatagagttgaggcggcgcgtggacaattccagcgggttgtatagcgctgatttttctaacgtaaacgagttcaaatggcctttgttataccattcaagacaaataattgtgtacaacagaaataaagtagttttgtctacgctctcaaaagcgtatttgttttttaaacagtaataataaaattttaaagaattgtacaaataaaacataaaattgttcattcgcatgtaaaactcaacgtcggtaacaaacaacaaatggataacgttggtttgtaacaaatgcgccaacttgcgcaaatacaacattgaatttttatcatcatcgatgcgaattaaaagtacattcggtgtatgcgtgtttaaaaccacttgaaaattttcagctgttaacgcgtttacaaccgaacgccaatgcgcggcggccacctccaaacacatgtatttttttgaaaacacatgccgttttataatctcgctaattgacgagattgacgacaaatatttttcaaacgctgcatcttcccaaccacgcacgctggccggcgccgcaatgtccggttggtgtttaaaatctaaaccgctttgaatcaatttggtagttatcaaaatgctaagttgctgtcccagtgtgtaatgatcctcgtagccgcgctcccaaataacgttgcacgcaaatttgacaagatttgccacgcaaggctgttgcaaaataagtcgcagcctatgtgcgtcgcccttgtaccagcgatcgcgacacaccaatttaagcacggccgcgtcgtgcgcgctcaattcgggccgcgtcacgtctacaaaatcgttcacatcttccggtgtcgcgtgcgtgacgtgcgttaatttgtccaaacaaaatatttttacattaaaaacaaaacgaataaaaccatccgagttaacttgcaaatcgcgcgttacaagtcgcggcagctgcacgttgacaccgctgatgtgcaaattgtacatcaacaacgcatcgtcttgcgcgcgacacgcttccggcaaaaattgtgtcgtatagtgcaacgaatgcgcaaacatggagtcgttggccatcgcaaacaaagaccagtttaataaacggctggcttatgtgaacgacattgtgataatgatgcagcgcacaatggattttatggcggcccgggggcaatgcacgcgcgcggacgcggccacgttgtgtttagcagacgacaccgccgcttggttatgcgaccgtgccgatcactgcacgtttgtttcttttcgcgtacgcataaccgcgtttcagcacccgtgtcgcgcgcttcaacattttatgtttgaggagagtttaacgcagcggtttagcaaaatgttgccgcgttatacatacatgaactattcactatttaaaaacttgtttgccatcaagttgactgtgtacaggggcgatgtacacgtagatggaccaccgtattttgtacattttaatggcaaatgtgttcacgcgcgcgttcgcacaaatgacgccattctgtatcaaataccactatttgagcagggcgtcgaagacatcattgcgcagtctatggttgaacagcaaatttaatggacaatttaaaatttgacgtggatgaattttttaacgctgacgatgacgcaaatacttgcacgccggccattgtgcacaagcttgatttgttgccgcatcagaaaagtggcatcggatggatgttgcaacgcgaaaagcgcggtaatccacacggtggcgtgctagctgacgacatgggtctaggcaaaacgttgtccgtgctgttactcattgccaacaacaataatgtaaatttgaaaacgttaatcgtgtgcccgttgtctttattaaatcattggtgcggcgaaagcgacaaacacaatttaaacataaaattgtgcaagttttacaataacaaatgtgaccaatcatttgatgcttatcaagtcgtcgtaacaacatacgatactttgtacaaccatcacaaattgttaaaaacgaaacaacgcgctagcagtttattaacgcgtcaatggcatcgcgttgtattagatgaagcgcatgttattaaaaattgcaaaactgctgtgcacgcggccgcctctgctttatgtgccgacaatcgttggtgcattaccggaacgccaatacacaacaaacattgggacatgtacgccataattaaatttttgcgttgcaaaccgtttaacaacgcggccgtatggaaaatgttgaaccgcaacaacgacacgaatcatattaaaagtgttatgagtaaaattgttttaaaacgcaacaagtcggagattgcgcttgacattccagaaaacagcgtacaatacgtatacgtaacttttaacgagacagaaaaacaagtttatgacattttaaaaagcaaatcgcaaaaagcgtttgacgttgctgttgaaactgacggcaaagatttaaatagcatgcaggatgtgctttcgttactatgtcgattgcggcaaatgtgttgtcatccggcgttaacaaaatgcgcgcacatgtttgaaagtcatgccaatatatttgaacccacttatgctagtagcaaatgccagcgtgtactagaattaatacagcaagtgctgaacacggacaacgacaagatagttttggtgtcgcaatgggtagagtttttgcatattatagccgcgttgttacgacgccacgaaatactcattttattgtacacaggcaaacaacgtgttgaagaacgcattgcggtagaaaatcaatttaacgctgctaattctccgtatcgggtgttgttaatgtccataaaatgcggcggcgtcggcctcaatctgatcggcggtaaccacattgttgtgttagaaccgcattggaacccgcaaattgagttgcaagcgcaaaatcgcatacaccgtttgggtcagaaaaaacaaacctacgtgtacaaaatgcttcacgacgaggacaacagcgttgaacgttacatgaaaacgcgacaagataacaaattaacttttgttaacaaagtgtttgatcgttcaattcctgattatgaggatattaaaaaattttttagtttgtaacttaagcatgaatgcgcattacgcaaactgctatttgtgcaacattttagtgtacttgtttaaaaaacagtttgctaaaacttctgccgtcgctgcttcgttttatcgcaaacatatggccattgtgcgcggcggtgtcgtgctgtgccaacgttgcaacgcagaattcgatggcggcaactctaaccggcgatgataaatgttacgaggtgactacagggtgtggtgattgcgtcgtgctcaccgtgcgccgctacaacccgcacattgtcggctttgccggcattcgcgcgcatttgttggaaaaattgcgggacaaaacgcagcttttacccaattattataattgcgctttgaacacagtggcgtcattatgcgcccgatgtcgtcgtagtttaacgctgtttccggccgtgtcgtatttgccgtgcggccattcgtgtttgtgcacagattgtgacgaattatacaacaggcacaatctgtgttttgaatgtaaacaaaatgtaaaatacaaattaaaatttaaaaaataaacaattaaaatagttaatgtgttttatttataagcaacgtttatttattatgacaatcacgtttatactcgtgttagtagtagttctgtttattgtgttgtttgctagtacaagcagcaacactgtcaataacaaatcatacaccaacaatgtgtcggatcaaagcgtattttttagttcaggacatgcgactgaaacagacgaattgtttgaattcgagcaatggtacaaaagtactttgactcgcgtgtttgccaaaaaagcagaaaaggtggctaatccgacgcgcaattggaacgcggaaaccgtgtttgacaatttaagtccttggacgtcgccacttgattttggaacagtgtgtcacacgttaataggttattgtgtgcgatacaacaattattccgacgaattatacaaaaattccgaactcgccgacaatctgattgccggtttgcgtttggtgtgcgataaattgccggatccggctccgcatcagcaagcaccatggggtccggtggccgattggtatcattttactatcactatgccagaaatgtttatgaacataaccatagtactaaacaaaacgcgtcattacaaaaaagcagccgcactaacgcaatattggctgggtttgtatttgcccacagccgtcaactcaatgggttggcatcgcacggcgggtaacgcgatgcgcatgggtgtgccatatgtgtacagccaaatgttgcgcgggtatccgttgcgccaaattgctatggagccgggcgtgctagaaacgctgcaaactgtcgcgtttccctatgtaatgacaggcaacgggttgcatcgcgattcaatttatattgatcacgtcgacgtgcgcgcttatggttatcttattaattctttctttacatttgaatactatacaaaaatgtttggtccaaacgctgtcaacactgtaggtctcacgcgcgccattcaaaacgttggcagtcctgaaggtgtggtggtgccgggtgtcatgtctcgtaatggaacgttgtattccaacgtgattggtaactttgtggattatccaaatgccgtacattctgccgatttctccaaagtattaactaaattgtcggacacgtattacggtggtgtagtgggcgctaccacacggctagcatattacgaagccgacccgacaaacaacacgcaggcgcaactatggactatgacgcgccgcatttggaacagacgcgcgcctgttattaattacaacgccaacacggtgccgtttgagtcgggtgttattttgcaatcgctaaacggcatactgcgagtgcccagcaccaccacgtcaacacaatcgtttcggccagccgttggacaaacggcgctggccgaaacgcacactgccggcgctatattggtcaacgcaaagtttaccgaaatgaataatttacaatttaaatcgtgtacgttgttttatgaaaacggtatgtttcaaatgtattacaatattggagtggaacccaactctttaagcaatataaacggacgcgttgttgttttaacccgcgacacgtctgtaaacacgaatgatttgtcatttgatatgcaaagaaccaacaacgacgggtcgtcggaaggcaccacatttaatggggttgtttgtcatcgcgttgcaataacaaattataatgtgccctcactaactgtcaggagtcccaacactagcgtcgaacttgttgaacaaataataaataatgaaagcatgtatacagcttcggccagtgcttgctacaaattaaatattgaaggctattcggacacgcttcgagcgttttcagttgacaatggtatttatgtaaacacaaacacagacgtcaaagctttgtttgcgtacccgtggttgatgttaaaagaaaacgacattgttgtgtttatgtcggcaaatgaagatgtaatagtgccttttaatgttattacaagttcttttaatgctatcaacgaacccggtttgttatacacacctaaaaattgttacttgcacagcaacggatttaaattgatagacgactcaatagaattacaatttatttttgatattataaaataaaactcaaacaaatcgtaataaaaaatttatttaataaacttgcgccataacaaatacaatttgcgagttataggtaaatttttcatatgtgtcaaacatttgcaatgacaaaatgaaaacgcacggcaaatgtcacaagcaataccgtcggccatgctccactttgtcgcgtcgatacattgtttagcacaacaataaatttttttctcgtccatggtacacgctactgtcttccgtcacgtacacgttaacattaataatttgcaagccaattttcaacacggctgttaaatagtcaacagttccattgacgggtataacaattttaccatcaacggcgtgttcttgcacgtacacaaccgagttgccaattaacatttttgcataacactcgtactgatgtcgcaaaccactaatttctatattgttggccaacacgtttgtttgaagtcggttaaacttgaacgacgctgtgttgggtgtttcaaacgacgcggaacagcatttataatgtttgttaattttaactcggacgttttgcaaaacgtccatgtcattcaacgacattgttgctataacttgttataatttttattattaaaattaaaaattaaaacgccatgtttgcaaacatcatcatttgttacaccgttttcattacggcattgttgcacatgagcaagctggacatgacgttaaactcgccgcaatcctgtggcaaattagagccgccgcgcatccattgtaaactttccgcaagcctgttacccacaaaagattgattttttgtccactgatcaaaacgcgtaccttccactttttcgtggccggtaaaattgtttttgttaaactctttgtatatgttgtcgggcgaattgttaaacaacatgtacggaatattaaaaatagggtatcgtttagcgtgttggtcggcgtggttgccgccgcgcactacgtatttgcgttcgattttgtcaaaatttgattgccgagacaaaaatgaaacgggcgacaaacaaatttgtgcataggtgccatcttcagccatccattcggtcaagtcttcgctgcgatttaacacccccttctggccgtacacgctgcacactttgaccccttccaaatcgttagtaaacgtgacaacttgagttttcaacactaatgcatcgcccgttattgtcatatttgcgtttaacgactcgattacttgattgcgcgtgcatcgaaaaaacacgtatacaaaatagacattaaagtcgccattggtacgcgtttcaattatgcaccgtttgttgtcggcccaagcaattttaacgctgctcaacaaaacgcccgcaaagtattgtaccattttgtcgggaagcaaaatgcggtttcgttctttattgttagcaataaaattgagcactggcggcgtttttccgacaagcgctaatttgccttttaacttgttgtttttgttgttgtataatcgaattggcagcgacatgtgcggaatatacggatcttcggccgtcatcagtttagaatcgcgcaccagtgtccacaattttaccattttattgttcatgagcacgttgtcgctaactaccacggacaggccgattggcggcgttttaaatttgctgtaactcaaaactggcatggcgttttttaaattagtcagcgccactatcattttgggcaccggaatggtgtaaaacaaatgcgtgtaatcggcaaaataatattgttccaattttgacattaaacacaatacgtcatcattttcttcaatttggcatccgttgacagcagggtcatgaaatagcgaacttttgtagtgatactcgtacggggtgagcagcgcgttgattgtggcgtgaactggtgcaaatatgcgcaattttttagccacacacaccatgccttcatgatggtttacgtacagaatactttgcgacatttttaactcaattggacaccgattgcgttttaatgtgtacacgatagtaggcacgtctgttcgtcgacattgcaaatttgtcggtctgtcgttaaacgcgatcaacaacgtagaattattactttgcgttatatcatgcactggcgtggcgaggtttagttgcattaactttgtaaatttgtcagcaactagattgtaatcgacactgggcagacgcgcgttgcggcacaggaaaaactttttgcctgccacagtcatttcgccatggaaaaaactgcctatgaacttgacaaaatcctttttttgctttaacattttttggcgcacgctatcattggtgatgcgcgtcacctcgttgccaatgcggtacttgagcacgggcaacgcgatttcaatgttgttgttgctgcaattgtcgtgctggctaaaaaacgagcgccgttgtttgctaaacgttttagacacgcaataaatgagtcggccgtttacaacgctgtcaacaatttttttacattctttgttataaagcactgtttgcattttgcggcgtttcacaggcggcgtgtcacaactgtcaacgcgatttttatgattttgcaataccattgaaattaacaacaactccattaaatatgcgtgtttgtatataattttgttggccaagttgtcaattgagtaacaaatgtcatggttcattattattttaatgtgtttgaccaactgttgtttgtgcactttgctgtattgaaacaaaaaatctagtggtcgccatttgccgcttttgttcaagtacgtttccagcaccgcgttcaggtcgtttgtcacaacataatcgctggcgtacacgtcgcgtgcaaaaagcgcgtcgttttgtttgtcgtataccaattggatggcacgattgatgtgcttttcggcgtccacgttgccgtacaaaaacatgcgcttgcaatgttttgcgtacagtttgttgtaaaagttgtgaattaacacgttgttgttcatcataatgttaggaaaactaagaaagcggccgtcaagcataaacgtgccgttgacattattttgcgcgtcaaattcaacattcgcctcgcgcaaacgtttgtctaactcagtgccaaacaccaccaccacacatttgtgcaacacgcagttgcgttgattattaagagcgcaacacatgtacgatcggcgttcttgtataacatttaaactcaacaatttgctatctaaactgcagcattccaacacaaaagttaatccgtatgtggacattaatttgtcgtacagttcgttaaaatcttgtacaacgtccgtcatcttgactagttaaccgtgcactgccaatggcgacgcgcagtgccacccgtaaacgtcaagcgacggaagaaattaatgtaggcaaagtttttaaacataacaaattgtgcgattccatccacgatgattttcttggattttgcaatttagatgaaattgattattatgaagctctaaaattagagtttaaccctaaccaagttgtagacgaacaatttgtattagatgttattagactgacaaacgtagttaccaaacaagttcgcaaataccgcaacttaaacgaacaacaccacaacaattacgtgtataacgtactaattatgattaatcatgcccgttctgtgctgaccgatcaaagcaaaaaagaacgctacgacaaaattgttgttgaaaaaaacaccaatgttatgaaactttgcgacaattacattatgcagctaaaacaagttggtcaagaattaaccgaagctaaacaaaaatttgtccaagaactaaaatcgtttaatttgccacaatttagaaaaatgttaaacgagtcgttagacgaacgattgcaaaaatggctttcttcgcaaatggttacaattgaacggcctaccactatgaaccgagtactggtaaaatgggtattgtttgaggaagaagttaattataacaaacaacaagttgaacaaatgttacgaaattattttgaacaatttggtaacatcgtaaacgtgtatgtgtgcgatttggaaacaggccgcgccattgttgaatttgcaacacttatagcgcagcgcaaagccattgaacaaagcagattgcccaacgtgcgttttacagtcactgaatatatgcttactgaattttataattcccaaatgcgggctaaactgcgcgacaaaatgaatagcattggtagccaattgaatgatttgcaacaacaacttgccgacgcacaagcacaattgaatcgttcgtaaaatgtgaacgtgtttttcatgtacgtacgttcttgtaaatcaatctcaagtttaagtgtgtaaacataatactcgagtttattggtattagattactttgagaagtgacgtgtaaacatcgagcttgatactcaacacgtcctcaaacatattgctttagggacgtgtgcaccgacaaggttaagatgcttttaaccgtacacttgaaagacaaagaatattatatgtataaattgtttaaagaaatatggcctacgtgcacgacagaatgtagaatatgtttagaaactttggacacaaacggtggtgtggttggaatgcctgacaatgggatgcttaatttggacaaaatgtttcatgccacttgcattgaacgttggaaacgcgagcgcaatcgcgatccttttaaccgagtcataaaacattattttgcgtttccgccaccaacgctgcatgaatgcaaaatgttgttggagttgacgcgcgggttcattggagatgatgacattgaccgcgtttacaagtctgtgcataatcgcgtcacgtccgaggacgcaatcgacgttgaattaaattttgctcgtttttttaaacatggcgcacacgttgtccacggcggacgctgacttgataacgtgtgtgttaagacacaatttatttctgctaaataacaattatatcatgtgcaatgtgttcgaccaagcaactgatcgcgttgaacccgtgtgcctcggtgaaattaatgccatacaagccgatacgtgcgaccaaaatgcaatgttggatgcatcctcggcgagcgacgtgcagagttcaacaaattcgtaacgcgtatcacgacgagtacaatgagagcgatttattgcacatgactttgtatagcgacatttttttggacgaacgcggccaaccatattataggcgattactgcgaaaacgttttgatggtgccgcggcacgtcgcgtgttcttcaacgcgggacaaatacatgattgtttgttgcttaaaccgataaataacgaacgatttaaaggcattgaagaagcaggagaaaccaacatgaacacacttaaaataatatgtaaaacggtggtcaacacgttgggccgtttgatgaaagacgaatatttgctcatagtggatcgtttgtttgttgatttggtgtattcggaatttaaagcggtagtgctgccgcaacacgcgtacattatcaagcaggcatgcgcgcaaacggacagcgagaatagtgacgacgatgaacgttgcgagcgtcgtgtggaatcgccatggaatcaaattataaacatgttttacgttactgctaacaacagagaagaagacgggcaatacaacgtatggcaacgccaatcccagtacatttaccaaacttttctcgtgtacgttaccatgttgacgaccattttgaaacaaagcaatccttttataattagcgaaagcggatccgtatcaattattttgcgcaatttaggcaaatgtcccgaaaaccctgagcgtgtcaaatgttgcaagttgagttatggaggtgcgccgcccgggcacataatgtgtccgccgcgcgccattgtaaaaaaaatttacagctacattaattgggcattaaacccgcacaaagaccggcgctacagcgcattaatcgcgcgtccgtcggattcagtaacaggtggcggttcgggtgatttacaagaaaatacaaacggcgatttgcatcctgatgacattacgccgctgagtttattggattgggacaattttgttagcgcgtacatggactactttggcgcaagtcccaacgagcggccggcgggtatttaacggctgacctatttgatgagcaaacattgttatcttggctgattatcggctggtcgccaacatgaaaaaagtgtcactaggaaagattattgagagcaccgtggaggacaaatacacgtatcgttttagtgcagaacgctcgtctacaaaattaaatcttggcgaatattacaaaacgtttgaggccaaccgcgtcgggcagcacaccacttacgacgttgttggcaaaagagattacagcagtgtagacaagttgaccaaaaagtgttagcatgttgcgggctttaaaacgccggttcaaaagcgccggcgtagcgcaacaccatgaagaagacgtagttttgtgccctcgatgctatttcgtcgcgcccggcacaatctcagttgttgattacacaaaactacacatcaagtttaatgaacagtttgttgacaagtgtccaaacaattttgaggtaacgcaacccaaaacttggtcgaatggcgcactttgttctgccctttactatccgctgtgttaatagaattattttgtacacgttgtggttttcttcaaaattgtaatagccatggaattatgtgccttttctcaaaggcttaaagtcgcgtacaccttgcgacgtcacattacaagtttatataaatacgatttccacgcagacgctttgtttattatgttcgagacccaatctatcgggcggacgtacacgatgatacatcacgctcgccgtgtggagtttgacaacgtaacgttggacttgagcaaagttgtatttaccacagacgaagcaaccaacgaagagtacattgtatttcttaatgtaaaacgtgcattttacaaaaattttcacgtgacttgcgacatgtctttggaaactttggcgctgtacgtgtacgaaaatgcaagcgtgattgtcaacggtgtgactacaacacgtgctcctgattttgtaaatcacatctattttaatgcgtccgatcgtgatcaatctttaattgtggagttcaacatgcatgccagcgttgtggtggccaagaaattaaacgccggagaacgttattaccagcgggccagcgggttcaacgattttcaacggcggcaccaagtgccggctgcaataattgaacgtgacatgaatgtgcggaacgtgacggatcgcgagttagaaataaaattgtataatttgtaaaaagtttattaataattgtcgtcttcgctagtgtgttgtaatttgtcttcaaaactattgtattgtggtttagattttttatataaattattcttttgtacattgttattagtgcgttttttattacgtttagcatttgtacgctttgtttcttcgtcggtttcatacgcactactactgctaccactactgtcgctgctgctgctgctgctatcagttcttcttcttttgtcaacaaaacgtttgtttggttgcgcaacggtttgtgagttgtcgctgttgtccgacacttcgtcacgaattatctcgtacgcggcttgtcggggaatccattgcaaattgttaacgcgcacgtaacggttttcgagcgcttcacgggctttttgcatggccgcgtcttcatcgcccgcgtttagtttgtgatgtttagaaaaggtatcgacaaacaattgtttggcgcgttttggcagtttttcgtcatacagcgtatcaggtatatggtacattgctgtcgtcgtttgaatctgtgtcgcttgaagaagaactggtggtgtctgtttggttagcgtctggtcttgcttgccatctaccgtgtatcagcatgtatttttttctaacagcgcaaacggctagtttgtaagcaatctttgtagagttaaatttgtgtaaactgcgtttgtaaaatttgtagaatattctcttaccgttatacggtaaattacgtaatttgtttggtaacatgtaaataaaaaacagtcaatgtattagtttgttttattcattttcaagtcttgtaaaggcaagatactgcacacaaccatttgagattcaacttgatcaattaacttacttatatactatgcaacaatttaaataatattctgtaacatgttttgtgcgtccgaaaaaggttgcactttgtggtcaaacgcaaaaaagttgttggcctttaagtattcaatgtgctgatcgtttttaatgataaacacacgacttttttcgtcgcgccgcaccattacgccgtgcttgcatatagaaatgtacttgtaaaagggcaatagtgcgtcacgcgctttttttagcaacaccttgtgttcggctggagcggcgacaaatatcttgactggaccgtcgtaattgacgtcaaggttatagtttttgaggcgttgttcacgcgatttgctttgccattctttagcgcgacccgcgtcgcaaagttgcactacaatatggtttttgtgaaatgacgaatctaaaacgtgtttaaaatcaagttcaagtaacgaacaaatttttttcaagtagctggttctaatctttttgttacatagtcgcgcatcgtgaatgccataaatttcgacgctatcgtttaaacggtcgcgttccaactgtttcagctttacgtttataagctttatgtcgtttgattcgtcaatctgcgaattgattagcgacttgagcaacgacacgttaattaattgttcgaaccggtccatggtgacgacgacgacgacaaataattgtaaaccctcttatagtagcaaaccacgcagagtgcgcacgcgtcatggttacctttttaaacaaacctgctaccgaatttgacctaattttggactctagcaaactgaacaatgtggcgtttttttccaatgatgaatttaaaaatgtgctcaaaactcttattgcggatcttaaaaaaaatcaaaaacctaactattttaacgggctaatggatcaaatgattaacgtgtataaaaacgtgcgcagtggtgacaatcatgccgctgcgcttgtaaaaattattgatgccacttgtgttattataactaatttaccgtctaatgtgtttttaaaaaagttaaaaaccaacaagtttaccgattttattgattacctcatattgcctaattttattttatgggattataattttattatatttttaaacaacacgttcaattctaaaaacgaaaacagttttgtagacatttcgggcgcgttacaaaaaattaaattaactcacggcgtgattaaagatcaattgcaaagcaaaaacggatacgctgtccaatactcgtattcgacatttctcaacaccgcctccttttacgccaacgtgcaatgtttaaacggagcaaacgaaataatgccaccgctgcacgctgtgcaacgatactttggacgcgatgtgcagcacgctcgtgcttggaccacgcgtcatcccaacatcagccagctgagcacgcaagtttctgacgtgcgcataaacgagtgcgacaccgattggaatgtaaaagtgggcctcggtatctttccgggtgccaacactgattgcgacggtgacaaaaaaattatttcgtttttgcccaggcccaactcgctcatcgacgcggagtgtttactttacggtgacccgcgttacaattttatttgcttcgacaagaaccgtttaacgtttgtgtcacaacaaatcttctacctatataaaaatgtaaacgctgtagaagctttgctaaaaacgatgccgttggcgttcgcgttatggcaattgcacgccaatgttaaattttccgcgcgtctcaagttgctgttgcgagatttttgtctggtggctagttccaacgctagctacttgttgttcaaacagttgaccgaattgatacaagacgaagaaatggtgtgcggtgacgaagaactgtttgatctcgccggtcaatttaccgccatggtaaaaagtggcgctaaaggaagtagcaatttgattaaaagcacgcgtcaatacgcatgcacgcaagccaccgacattaacacggtgtcgacgcgagcgacaacaagtttaaacagctacatttcatcgcataacaaagtgcaagtgtgcggtgcggatatttatcacaacactgccgtgttgcaaaacttgtacataaaaaacaacaacatttgctacaaaaacgacgatcgtcacttaggcagcatttgcactttgccttctgaatatttgtttcctgagcatttgttggacttgtttataaactaataaataaatttgtactacctatgcgttttttttttaattacaattcatcaatagtttcgcgaacaacggggtcgttgttccatttgccgtgcgcaccatcgcgacgccattgctttttgtggccatgattgtgcgcacggtgttgttgatgccattgatttttattggtttgcgaattgtaatgtccacgactacgtgtacgcatgcacgattcttcgccgttatcgttatcgccgccattatcacctacatcttctgcgtcgtcgccgtcacagttattgcattggttttgttgttgattgcgtaactgatcgcgcacggctttggcggcacgcgcatatttgcactcgtcgttttgagagtcaaaaatgagatcagcgcaattgtaaaaaccttcgccgacgggatcaatgcgttgccaacgaacgtacattacaaattgaccggaccgatatggtaccgacacagggatagagtaaacttggttactgtcacatagcggatcgcccgggttaggtacaaggccggaattgttaccgccaatgtactcaagttcgttccaggtaataggattgcgtcggtcccacgtagatttggtaacaaatacttcaaagtaactaggttcatgaatagccgtggggcaaaaatgcacgtccatgggatacgaattttgataccggttcatgtataacacgtccggtcgccaattgtaaaacggctcgtccataccactcttgtcaccaaagagagcagcgcggtcgttagacgctgcgccgcaaagcgtgtgcggcactacgtcgcgcttgatcatatcaaagtcgcgataattgggaccggcaagtgccgcatattcggtgtattgctggaacatgtactgtgctgcgctggcggcctcttgtgatggcacattaacagcgcgatatttgtagtatacgtttttgtacgcgttgcgacatgcttcgtcgggaatgttatcgccgttgttgggccaccaaaagttgccgtcgctaaagcatttgtactgtctggcaactggcaccgacaaataaccgtgcgggcgcactgcaggcgcccacaccaaaacaaacaaaattatattaattttgtacattttattatttatcttataattaggtacataatcaacatttatacaaacaaaacttaaacgtgttgttgttacatttattaggttctgttgcgtcgctgtcgtctgcgtcgctgctgtccatgtttttttgcaaaccaattttgacttgcttaacatactttttatcatgcacttggtgttgcatgtattttgtgagaatggctttgtaacattcaaacaattcgtctctatgtttgtcaccaaatatttccaataattcgttcataaacgtgttgagaatggtcatgtgttttagccaactgatgcgcatggtgcttggatcaaacaaacgcaaaggatgcgatttttcagtcacgctgcctttaatgtccaacaacacgtacggaatgcgatcgccgttgccgggcacaaaatctgtacctttgttcacaagaatttcacggcaatgtcgcgctatagtaatcactcgtcgcttcttggtggccggctcgtcggcatttgctttgctgccggtgccgtcattatatgtcatgctaaaattgtaatcggtgagcggtttactaatgccaaactcgtcaaaatattcaaacataatacattttaaattttgcaagcatttagtcaagtctttgtgacgtaacacctgttctatggcagatttaaacgcaacacgcatgaatagaggcatgtcttttttgactagccaacctttaaacacaatttttgagtaactgttaatgtaacaatactttttcttttttaacaaaattaaaacgttcatcaaattttcaaacgccattttatagccgtttgtaaaaaggctgttaacgcgacactctacggtagcgcaaattgattttaaaatagccatacgttggtcttcaggaatttcatcgtgtttaaaaactggcagcacaaacgttgaatcagtatctccgtacaaaactttaaaagaaagcgatgacaaattaaacgattgcagcaactctggatcatcaaccaaactttcaataatttcaatagcagctgttaatttttctcgcccaatttttgtaatataattggccagtgctttgcaaaaaataccgtaataaccataaatactgttggccgtacgcttgctcaggttttgcatctggtcgtaaagatcgtataaaaattctgattctgcttgatcatcgcggcgtttctttaattcgcagcgttgctttaacagctccagcaacagtttgacgttgatcgcgtttttgtcttggttcaagtacacgttgccgtcttggcacaaaataagattggtaagacaggcacaaatgtcaatcataatagtgaggtacaatgaattaaaatccaacgagaatgcatattcgtaaacgccagcgcgcggctgtaatactttgccaccctcgtatttaattgatgcatttatagcgcctaaacataaagcatttgttggaacgtccttttgcggtattagtttgcgttgcaatccagccatgcctttgccgtttttgcacgacatgaaacccaaatcatttttgttaaaaaaatacgcgtcccgttcgttcgattctgtggtggggtttgcgcgcgtgtttgtcaacgccagatgaaaaaaagtgctgctgatcaaatgcgatatgttgcagataaaatcgtcggtgcacaaacgatacattatgcattgagaatacataaaatcgtttagttttaattttaaaaacaaacgaatcggcaacaaacaatcttgcacgttgtatttgattatagtttccaattgcttgctgttgtacatttttaccatatcttgccagtttaaatcaactttggtgtcgcccaaataatatttgctgagagtgttgagttgaaagttttcaacatcgcgcttgttggcgtccgcgccaaaatatttatacaaatcaatgtgtatgtaataattaaaatagtacgtgtctgttctattgccaattttagttataaataatttggtgttgggcggcatacaaggcaaatcataccgttgcaacattatttttttgccttttaaacggctgcgaatgtaaggcaggtcaaatacatcgccattgtagtccaaaatcacgtcaggattgacaatttttaaaaaatcaaaaaatgccacaatcatgtccgtttcgttgttaaacacgacgacgtacgtatcgtcttgctcgtactgcaaaatattcaccggctctttgtaatacacaaaacatatctttgtataacaatcttgtttatacacagctaaaccaatacacatgataacgtccgtttctggtttggagctgttgtgtccatccgaatgtgtttcgatatcgtagcacgccatcaccggcggaatgttagcggtcaaggtggctgcatcaacaacttcaaaatcggcatcaaaacgatctaacgcaaatggccgtgcatcgttagtaacgcaatagttacggcatttttgcgccattttaaatttcatgtacgatccttccactataggcgtttgcatgtgcactctgttggcattatgcaaaaacttgtcaagtgccgacgatttctcggcaaacgaactgttattgcgtttaaactttataacatttatcttgtccatgtgcacatttttgactcccggcgccacaaacgtgttgtaacttgtacagcggttgcggcatgttgcaaataaatgattattgtaacattgtttgtacgaatacaagtccatgttcatgacaaaatagaattgtgccaaataatcatccttttttatgttacaaaacgctattagcgtgcctttgttctcgtcgtaatgtatgcgtatgacgcggaacgcttcgttgcacgatattgtatacgtgcgcggagcgtagtcgctaaacgcttctttcaactgattgtaagtgtggattttcattttgccaaaatgcagcgctggcccaaatatggagccaccgacgtcaacacgcgcactgttcacgacttgctgagcactattaactctatgactgcacgtattaaactgctggaacgctatgagcaagcgttgcgcgagatccacaaagttgtagcgatgatgcgaccgggctttaatctacaaataatggaacccgacgctatgcccgcactgattgtgcagtttttttccgatatgacaggtcgcgattccacacacaatattaactacaagtacgattacaattttggcggtacgctgcctttacagccgccgccaatgcaaccatcgtacccgcaatattgggcacaacaaccaccccaacaacctttttatccaccttatcaaccacctccgccaccacaaccaccttatccgcctccgccaccacaggcaccttatcaacctccgccatcacatccaccatatccgcctccaccgccgaatcaaccttcgctgtttaatcaacaaaatcaaccaaatcaacctatgccagaaattttaagtgaaccgtcgcagccgtcttcttccacaccaattccacaacttgttgctaaattagaattaacaaacgaagaaataaatgaatttgaaagtatatgtaaaaacatgcaaccacaaaccattacgtggaacaattttgctgtttttatacacacatttttaaagatctttcaattacgcattgttaataatgttactgtagttgatgctatcaagtctttagaaaatgtaaatattttaacaaattatgattttaaagaatttataatgtgcgtcacaagagatacacatataaattttacaatctcaaaagaattatgtgctatctttgtaacatttattcgattttttcaaaacatttatatgtccattacaaagttgacgtatgtaaatgcagatcatgttgttgtaattactttaatgcaaactgttgttattcaactaattcaattttttattaccgttcatttttttataatgaaaattgattttaagttttccgatgttaaaactttaaccgcaacaatagatattttaactgcgcgcataaaagctttgccggtagcagaagaaacaacaaaaaacttgcatgaagaattgcgcggagaacgcgccacaattacaaaattacaacgaattaatcaagaggtacaagaaaaagttaacgatttacaaactaaatacaataacgcgcaagacgaaaacgaaagtcttaatgatgaaatttcaaaattgtcacctttgatacaaaaaacagaatctttaaaggaagaggttgaaaggctcgataaaaaaaataaacgtttaaaacaaaatctggcagacgagcacaataactttttagaagaacaacaaagacggcaaaatgcacaacaatctttgcaaaacaccgaagatttgcaaattcaaaacgttaatgaaaataataataaatatattttagaattaaaaaatgctattgaacaacaaaaccaaacaattttaaaaataaacactttaaatcaacaatattatgaaaaaattgaagacgacgcaaaattgtatcaatcaaatttaaacgatgctcaacaacaaatcaataaattgtcagaagaaaaaattgatgcaattaatgaagtaaagagattgcaacagcaaattttagaaatacaaggatctatatttaaaaaagacgaaaaagaatcaaaacctttacaagaatttggattaaacgctattaataccatttacgaaaagattaaaagtataaatcccgattttggaaataacgaaaatttcttgcaaatgagtaataccgatagtgcagtgcaacaatggaatcttgtgcaaaattggtttgataggttaagcaccgctttgtcgggtaatgatgttctcaatattaacaacattttgcacactaatgctatcacagcaagcaaacaagatttaaaaaatcaaatcattgaaagaattcctgcaaacatgttagtaaacagcgacaatattttattaacgcctcaagatgtgcaaaacgaaccagacattgttctcatcagtgccgttagtagacttgttagtgaatacaacaatttggcccgtgaaaatatgtcaattggccaacagcgcgacttgttaaccaactgtgcttctgaaattgccaatttaaaaagacaacttgacaaaaacgtagaagacgttaatcaaattaataatttagttgaatccactcctaatttaaacaatcaaacaatacaatcaatgcaaacagaattaaacgtggccaagaccaaacttaaaatgttaactgaagaaaaatctgaagatttaaaacaaattgctgacgaaggggttcaacaagaaataagcaaattaaactccaaaattgaacaaattaattctttattgttaaaatacacttctattatggaagaaatacaaaaatggaaaacaaacatgttaaatatgtacgaatcgctcgcgcgtaacgcgtccgacgaagtgcatatgattgaatagttttacataaaattgtactcgcaatcgtcttcgtcatacttcattagagccaacatgttcatgttgtttgcgtccatgttgtcggcagtgacaaaaatgacagcctttgtcaaattatcggccaaacacgtactcaattgatcaaagtccatcaacattttttgcataacgccggaatctacatcgtctgttttgttgttgttgctgctgctgctgtctacgtaataaacgcatttgttccattttgaattgtcagcatcaatcggatcagccactttaaactgtactgaaaaactttcttttaaattgtcaccttcctttagttcagctttaaactgcgacaaatgcatatatgtcaaatgtttgttggttcgactaatattattagtagcggtggagtactttaaattgatgtagtcctcgttgtcggtctcgtcggccgtttctagtcgcgtcgtttgcccagcaatccaatttaaaaatgcgttttgtcctttgtttgtgtattgacatttcacgccgtacaaataaaataatttgccagaatttttaaaataaaaatccattaattcatcaaaatcttcacaatttttaacctgcttcttggccacgctggccaatgttttggcattggcaaaacattccacttgttctacgcgtacagcacctcccgcatccaacatgttgatatcaaacaccattttgtaactgttggcgtttagacgcttaaacacgcaatgtagtttgacaagtatattaacagtttcttcattttcaaaatcgaggcgtgtcaaacacattttaacaggcgcaacgttttcaatgggcgcgtcacattttgtgtaattgtttatgtaaatgtactctttaaattttgttttaataaaatttaagctaatgttgtagcattcgctttctattaaatccttaaagcattgcaaattaccgtagtaagcttcaattttgttgtcgctgagaaaacgaaacgtgtagtaacgctgattgtcaatgctgagcgttgttttgtttagcaacttgccaattactgttttatagtcttctctgattttcttcctttgcggttcgccgctggtttcgtttgcgtgttcgcgtttagtcgccatgtgggaaactgtgcgttggcaattgttaaattgtgacgaaattgaaatagcacctgaataccgtgcgctggcttggcgtgaattgattgcaaatgtagcgtacaacactccgcttaattacacgttcagaacaatgtttcaaaaggcagattttgaaaattttgattacaatacgccaatcgtgtacaatgtcaaaaacaaaacactgatcgttttaaacgaacgactaaaagctgcgctaaacagacccgttcaacgcaacaatcgtacagttaatgttaacactgcacatgtctttttaatatttattctagttgtgctgttgacagtgctggtcgcgttttggaactatccacacaatgtcgcagcgcaaactggaacaactcaagcaccgtttggccgagttcgatgacgcgcacattaaacgagcgcgcgcgcgtttgtttgacggcgcgttagagcgcaagccgcgttgttggcgcaaactggccgagatagataaacactttaaggtatgccgcaacgtcaacactgctctggacttgtgcggcggtcctggggaatttgccgcatacacaatggcgcgcaacccgttgtgtcgcgtgtttggcgtgacgctaattgccaacgcaccgtacaaacgcgttgttcaaaaccattctaattttgtcaatgtagttggacccgacgggacgggcgacgtgctcgataaaaacgttttgttcgatttgagcgtagcgtgtggaaacgcgtgcgatcttgtacttgccgatggtgccgtggacgcggctggtcgcgaaaacgaacaagaaactattaacagggcgcttatcttgcgcgaaactcaattagcgctaatttgcctacgagtgggcggcaattgtgtgctaaaagtgtttgacgcttttcacaacgaaacgctagacgtgttggaacggtttgcgcgtcattttgcgcgttggcgcttgtttaaaccgccttcgtcgcgaccagccaattccgagcgttatttggtgtgcattaacaagttagcgatgccccgacccgataacaacgctgtcgctatggcgcgcgtgtttaaaaagttttgcgctttacaatgtaagcatttgatcacgttaattaacgaattgcaaaaaactaagcatggatttgcaaaagtttaattttttgcttttatcaacgcaagggcgagtcaaaactatggctcctatgttgttggatgacatgcaaaaattggatttggccaagacgggcttgttttttcataacaatttgctcaaatgtattggttgcaacacaatcatgaacaagatacatttaaaatcaactaaacgacacacgtattcggatgtttgcatttcggccaccaacgcgttgttagttaacgaaactttgcgcaaacagtccttttccagttttaaatgggcgcgccgacagtttaaatcgcacaacaaactaattgacatgttaagtcgccgtggattttattgttttgggaaaaaagcgcgtttacgatgtgtgggttgcaaagttgtcattgtatataaatcggtagatgatgcccaaaaacatcaccaagctacttgcgcgtttcgacacgtcgttgatgtaaacttaaacgattgttttatggaaaaaacaataatggcaacagatctaccaccaccgcggattgaaccaagcgcccctcaaatggacaatactagcattttagaatgcaaagtttgttttacaaacgaaaaaacagtatgttttttgccctgccgacatttggttgtttgcgcagcgtgctcgttgcgttgcaagcggtgctgtgtgtgtaatcaaaaaattacaagccgaattgaaacgctgccacaatagctagtaataagcttaaataccttattgtattgtatgcctaataatttactcactaaatttaaatttgtgaaacgagtgtcaaagattgtttcaactttattgtgcaaatgcgtggcgcgttttgattctaaagacggtgatggaggtgattgttatatgcaaattaataacaattgtaactttatatacattaatgttgtagtaaattaaaaactttgtgtaattataacaactgttttattgtaattaaatcaagtaatatatttatacaatttgataaatttgtttttaaaaaagtatagcttgtttgatcttcgtcaaaaacaatgctgttaacaatagacaaaattgcaaataaacgatcctctaattcaattcccccagcgggttcggtgttgtttaaatacgtttctattgaagactgcaacgataacacgttgtcatgtgtaacttttaaagtcgtttgttgcgctgtctgcgttgtcattgtggtggatcaaatgtcaaattgcagcaattaaacgttaacacgatacaattgggcttaatatatccgtggcttgtatcgtaatgggcgatttcaccatttaatttgctattaaacacgtccagtacggcattttttaaagtaatgttgttagtttttactatagcttgcagctggctttccaaaactttgtatatttcaactctaaattgttcgtcattggccaattgttgagcattatcttctaaccacaatttaaagggttcgtctacaaacacaccgcgcaataattcgtacagttggcggcccagtgaatacacctcgtcgtactctttcatgtttaattgcttgctcaatgtcatgacggcaaaatcaacgagtgcttgaagttgcttgtaatattctatgtatgtcgttttcaatttaagcccatccacagtgtactcttttgcgcaagcgcgcaaagttttatgatcgggccgagtttccggcgtttcaaaaacaattggcacatcgtttgtagaactcgtcatgtttattctcttataattgatacacttcgttcatttgcgtcactaaaaaattggaaaattcgctaatgtcttcacttgacaatctataaccgctcacaaatgtttgtataattaccataacattgcgattactaaatactgcgcaaactaaataatcaatttgtttcttcgtcaatttgcgagacgagtccacggtgccaattaaattgtaaatgagctcttggtcaatttcttgaacaataaacatttttagcacgttgcgcaacttgttgtaaaaatgctcatcacaatacacttgatcgttgagccaattgtgtaaagttgtcctgaccatgctcaccttggtggcaaacgtagttgactttacaagttcggcaaaaaagcatttcataacgttcgtcatgtttaatctaacgagctggtgtttttgtttaaaattgcgtccagcgcttgctcaatttccaatttttttcgcacgctcttagctttatgactgggtaaatcgtccacagccgactcggtatttttacttattagggctggagtgactagtatgaacactaacatcaaaatgagtaaataaaatacaataccgttttccttcttgtcgtacactaggctaaacacggccagcgcacccagcaacaagtacaaattcattttgccttaatatttgtcacctctacttattggctaccgttttgataatataacgacgacgaacctgccgaagaatttgcagaagagtcgcgattgtttgcttcttcttcgtcgtcgctgctgctttcgtcaaaattatatttatttaaatacggttttgtgcttgctggcgactcgtgattcattaaacgggccactttttgcaatggcacgccgctgttgtacaaattgctgctcaaataatgccttatcatgttgctgcgtggacgctccatttctacacccgcttcttccagcagccgtcgaaaatctttaaagggggtcgacgtgttttttgcaatttgcaataccgtaggattgcgcgcgtaaatttctcgcgccaactctagcggtttggtttttatattgtttagcgtgttgttgcgactgcgtttgcgtttaagatttattgtattgctgcgcaacttgcctttttttattaacacattgatgtcatcgacactaagttgccgcgcctcgttaatgcgcattccggttcctaacattatacaaaacacaatggcgcctctaattagcccacgatcgtgtatgtaatcgccgctcatcaattttattttagaagtaataaaatttaaaattgtatctatagcgttttttaacataaaatttttttctttttcgcgaatagttttgagttctttgtcgcgcggcaacataaccattcgcggtatcttgtattcgggcaagttcatagcgtttgtgtaaaaattaattgtgagttgcaacgtttccttggtcacagagcgtaattcaagcatgcgtttgcacaactctttggggtctacaagcaaccgttgaaattcaattgaatcaaattctctgtccaatgaatatgttgtgttttgtaagttttcgtcttcgattaggctaaaaattattttaatgaggcgcgatttgtagcttttaagcgtggtggctgcaaacggttttggaaacatgtatttgctccacaaactgtcgttttttacttcgtccggtgtgcaccgttgtcggtcagtggctaggtcaaacacacgctcaaaacgcaacgccgattgaatgcgcgctttccagtcgttaaaggcgctttcgctacgtgcctcatccatactaattaaatttgttatacaaaaaagaaggatcgttgtcaatatcttcagaatattgtggttgctctcttaatattacaaaataataaatcacgtacaaaagcaagaacagtgccacaaacgccaccaagctaataagcacgatcaaaccggccgacatttgattaacaggcgcatcgtttgttactttttgcgcataatcgtcgttatactcgtacgccggcgcgtcgctagctggtgtgtcatcgttgagtgccaatttgagcggaatatattctacgcgttcgtggttgcctaaacgataatacggcacgtccaaattcatgttagtttgtgcccgacaaatactgatgcaaaaattggggttgtgctttaattaactgcagtttaaaatatttgttgcgtttacgcttaagattgtattccaattgcgcagccgtcttgtagtcgtacgcgctggcgctgcgatacaacaaatctaaagattgaactccgcgcaaaaatcgtgcaccgcttccgcgtgcgtgtttgtttaaccggcgtcgcaaatcgcttgtgatgcccgtgtacagtttgccgtcatcgcggcgcacaatgtacacacaccacactttgtttttgtacaaactcatagcgcgcgaggttgtgctactagcttatccgtgtccgaatggttaatgatcatgaatataaaacgcgttaacgtttcacactgggccgccaattgggacaagctcttttggcacgcgctttgggtcaagtgcgcggccggcgaattgatggcattagcggccgacgttaagaacgccgcgttttcgaacatgtcgggacgcttgccgtgccgagtggccaattgcgacatgtaattgaatatgtcagcggatgccgataatggtgccagaaaccctacattttctttcagaccgacaacgcgcgcgcgatttttttcgttcaacacgtaatggtaataactgccgccgccggcaaacaaatcgtcaatgaccgcgttaattaaatcgtttatcatgttaatgtgcacaaaactacgcgattttacggcttcttgtacattatcaggtaacgtggcacgtttaagcaatagcgttatataattgtttgccaactgctggtcaaacggtaacggtatgggaatactacacgtgaccgcctccgacaccatgtattgcacggctaaactcaactgtttggctgcctcgttcaatgcgtctttgccgagcgtgtcggcgccgccattgtaaaatttttgcgcgtacgctggcaacgaattgagcacaaacgacggttgaaatatgttagcatccgaaccaacggattcagcaacgctgttttgccgcaattccttttgcaatgcaatcatatggcgcactatttcttcgtcactttgcacgcgtttaattatatttacgctaacagggttactgtcaatgcacatgtcgcgaattgtgtttataaattgaatcattaaaggagttagttctgacatgtcgttgcaccgataataacgaataattttgtgcacataatctgtacatttgttgtaccaaatagattcacccacatctacacttttagtatggggtcctgcgcgacttggaacctctgtaaccgacattgtagtaggataactgttggcgcttgttacaacagaggaggaatgtcttgcaggtgtctgcgaggaatttgaataaaaaccttctcgttcattcatgattttttaatgcgttcttatgtttgcaaaatacaacgtatggattacttataatataattgttgtgacaaaacaaagctactaaaattagcacaattacaaataaatttacaactgaaaaattttcaacgttgaacaataacagcagcacggcacagcctagtaacagagtttgaaaactgatacgccgacacaaaatgctttcgcaattacgaaatgccacattaaaaccattttcgcctttaatgtatctgcgcaactcagatttgcaacattcgtcacacaaaattataacttttataatgagaccatcggtgtgcaccgtttgaaacgtgcgtggctggctaccgggatgaaattcaaatttgtagccggtagaagtggacacttgagcaaaataatgagctaatatagaagctccagttttttttactttaaccttgtaaatttttattacgtttacatcacacaattgcttgtcagcgcgaaaaccttcgtacaaatattgcaaaagtagttcgctgtcgtatttaatcttgtgcatgctcgtccagtttttgcttttttggcgacgttggtgcgtcgccagattctgccccaaggcgttcggcgacaacgtattcctcggaaatggcaagtccatggtgcggtaccgacgcgtcagctagcttcttactattccacacctttatttcaaacaccacgtcatttaatatgacgttgtcttctttggcaaacaacataacttgcacggcgcgatgatcgttttttaataaattaacatcaacagtataattgccgtttgtaaatttagaataagcgccgttgtgcagcgcctccaactctgacgacggcaccacatgcacgtcgtgcgcacctctcattaagcgctgttctttgtcggtgaaaaattttaacagaatagtatcttcgtctgtgtcaacaaaacgcgcattgacaactatgtccgacgtggtgttgttagtgttggccattatttttattataatttttgtgcttatatattgcacaatattttttgaatttgacgaaacaaccttttcaaaacggctgcacgttttaactgaatatgcaaaacgcacaaacgccgaacacccaacacctgacgtgttgggtcacgtgtcagacgtgtacgaacatacatacattgtgacctggtttaatacaaacgatttgagcgtgtatcacgaaactgtgcacgatgacacgattgaagtgtttgatttcctagaacaaaaatttagccccgccaaatcaacagtggcgcaacgtgttgcgcctagcgccagcgatcccaacgcgtttgtattgacgggtgacaaaagcgaggttaaaatgcattgtccgcaacattttaactttgattataaccaattaaaatgcgtgccgatcaacccgtgcgatacgcgcgcgcccggcctctacgccatggacgagcatttactggacgcgttagtgcacagtcaacatcttgacaaagattacaccattaatgctcacctccaacaccctacattgtatttgcgctgtttagcggacggatcttatgttgtgcaagagtgtcctgacaattacacgtttgacgccgcaaccagcgaatgtaaagttaacgaactttgtcaaggccggcctgacggttacgtgttagattatttcccagaaaccttgttggtcaacgagtttgttgaatgttacgaaagcaaacatgttgtcaagcaatgtcccgaacaacatgtttttgatcgccaattaatgacttgtgtgcaagcgcacccatgcgcgtttaacggcgctgggcatacttacatcacagccgatattggcgacacgcaatattttgaatgtttgaacaatcaagaatcacaattgataacatgcattaatcgcgtgcgcaataccgacggacagtatgcttgttcgggcgacgcgcgttgtgcaaatctaaccgacggcaccggtcaacttgtgcacatgcatgtcgacgatacgtttgaatacgctagcggccaacttgtttgcgacaatttcgaagtaatttctgaaattgattgcaacacatctgacgtgttaacaaacatgttattcctgcaaaagtttaaattagaaaccgaatttccgcgtcaagtgtttgacaacggtgagtgcgtcccagcgacgtttaacaacgtgcgcgtgttaaacgacacgtttcctatacaaaacgtgccaaacgattacaatattgacatgcaaacatcaataattggtttaaccgacatgatacctaaattgttggcaggcgacgatttagatgatacttttggacaaaacgtggtgttggcgcgcgatgtgggcgccgtcgggctaaacccggtcaccgcggagcccatcgattgtttaggtacgcaattatttgacgtgttagacgctagccgcgccaacatttgcacagaatctggtgacggcgttttaaaaacgctcaaatttgaaaatgggacgtttttgagcgtttttcgcgacaatttgaccgggtcggacatagattacaagcgtttttgtgcaatatcctacgaaaactcattaaaaatcgtaaaaagtgatcattttgagcgacgtatattgaccaatatactacaatcggacgtttgtgccgatctatatactacgatgtaccaaaaatatactacacttgcacgaaaatatactacaactccgtttcaatatacttacactttcgtaaaaccgcctccaaatatcgttgtatatgctaaaaatatacaattaaaaaacgctacgatttccaaaccggcatttgacccctttgcaaataaacaaatcgacaacaaaaataacctagcaaaacctttattcgacccgtttaaaaacgccgtttggtatagcgaacctgacggcggcgacggtgatcattggggaccagatttgccaccacccgtacaacctgattccgaacctgatgaatcggaacccgaacccgaagtttcgccattaattttagacaaaaaagatttgttttattcgtgctactatgaattacctagttttaaactaaccagttgttacgccgaaaacgacgtgatcattgacgcgatcactgatttgcgaaataatgtaacggtagacgccgaatgtgaaccggccaaagatttgcattacgtgttaaacgcgtacgcgtacacgggcaacggtgtgggttgccgatccgtgttcaacgacgacggcgttgccgtaattaaagaaccaataccatcatacgtgtttgccaacttgaacacgcaatctaatgacggcgtgcattataaccgacatgtgcacgttaaggatggacggtacatggcttgtccagatcatttatacgatgatgttgaatttcgttgcaatgttgaagctgacaaattgtattatttagataatatgcaattttaaataataaaaaatgatacaatttaattttctttattataaacatagatattttacacaattattataattagaatataaaatacaacgtaatattagtgttttagtaaattgtgatcttttattaacctaatgttttcatttgttaattcttcgttttccttttccagctttgcattccgttccgaccattgaacgcgtttgtgcattaaatttttaatcgtttgttcttcttgtactctggtgcgacgcaaaatttcaatttgcttgcaggcgtcttgataattaactcgactattagttatacgttgttcaattgcttcgttagcctgcaccaaagttaccgactgtaattgcaaattgtaattgattttaatttgttcattaatttgcatttgcaaacgtgatattacagtatttaaatcactggttttagtgagttcgtcgttgtcggtgctgtctataaggcttttgttaaacaatgtgtgtgccaacgaagcggcatccaataatccgttaggaaaagtttgttcgcgcacatcatttactttgcacaataatttttccaccacgttgccattaacgctatacatagttatatacagatttttatgccggcacatgggacattccaagcgtttatttctggcgcgttgcataattttgcgaacacaagtggcgcataattgatgtttgcattgatgtaattccacaataggtaaaatgttaaccacatcgatggtttgcaaataataatttttaatttcacccaccgaaaaacaaatggggcattgtagttttacaaaattcatattgctgctccgccgccttgtgcgttaccaccgccttgtgctgctccgccaccttgtgctgctccgccaccttgtgcgttaccaccgccttgtgcgttattaggaccggcttctgcgacgggcgctggtggtataactgggttaaacgcagcggggataaaattgttaacacgcaaaatattgttttgcgtgttaacaagttgatagcccaaaaacaaaggcacgtacatgggatactcttcgtaccgattgagagtgcgttcaagcgcgcgtgtgttaccttcaaattttaaaaccgatctgagctgtaaacggtttgggcgcgattgtacaatgtccgtgctgcgagttgggttgtacaattctgtgacgttctcaatattatatacagttgccaccaacccgttagcgtttatagtacaagtattgcaattacgtaatcgcaaatcttggctgtcaatttgcaaaacttcaggcgcaacagcacgccttataagatttttcaaaaagccgggcatggctgcgtatattgtgtcgccattgcccggcactatattaccattttgtctgttaacgtcaaaatgtctagtatcgtcgttagctacgcgtgtgcaataagcgtttgggtctgtgagcgctataatattgcgtgtagagctatatacacgttctacaatactgtaagcgtcgttcgtaaagttgtcgtttgttttaagcatattgcaaattcgttgaatttcaactgtattgttataaatcatgtgaataattaattgttcagcaagcatcatgctatttaagttaaatacggtttggtattttgcatatgtaggcactaaaattcttttatcatctgtatcagtatgactaactaaatgccgacatatagttcttttgtattgattatcatcttcgtcaaaaattggcagcaccatttttgacattttaaaatacatttttaaatgatagttacaaataaagaacccatcatctacggatgcgtcagacgaacacggcgatctgtatgtaacgcaaacattaaacgaatcggctccgccaaaaatgcagtgattagtcaaccgccgcgacgacacgccgggggccacgagcgccattattgcaacaatgaacaacgatgaccactatgtgattgaaaaagaaatctcttatacaatcaattttagccaagatcttttgtatttaattttaaacgcttatattgtcaaaaagtgtcctgatccaccaaagcactatgtggacgtgtacgatgtaaatgacgtgcgcacgcgcgtggcggctgacagcgtgactagcgtgcgcaaagacaacttgcgcgacaaccggtttgtgcattgtatgcagtcaatgaacgcgttggtgcctataatgttgcgcgaaaaccgcgaaacaaatgtgccgtgcgagcgcgttgaacgccaaattgcatcatgtatagacacgttagtgtacaaatttgacgacgtagaaataaaatttgaacatgtatatctgcaaactagtgctgttgataaatacgattctaccaccgcgcacaaaattgtaacgcttaaaaacgcgctactcaacacgcaatgcccacacggcactcaaaatttacaacttggcagcgatgctattttagcacgcattcgattggaacttgaatacgacactgaagcgccaactgttgcccaacttgatagtttttgtgaaattgtaatagaaatggagaagtttgctgattatcaaaacatttcgccaagcttgccgtacaccacgttattaaacgaggtggttatgcgcaaatttgtgcgcgaacacaaaattgcctacggtttggaaacttttgacagtgtcggtgtaaaaaaatgggctttgaaactggacggcgtgcgcggtcgtggggcgtttaaacgtaatttctttttaatgcaaacagacgacatgcaaatgtactctgcaaacattaagagtccttttggtttaaacaacattgtcacgtttcaatgtgaagtgatagacaacaagattgttataaccgatttgttacaagtgtttcgttacaaatacaataaccgcactcaatacgaatgtgacgtgtacaatttctatccaataacgcctgtaacagccgttgaatgtttaaattatttaaatacaactattgaaaacgtgcctttgccccaatttggagaacttcgctttcaacaattttttgatccgcctttaatgtgtccacattacacgacattggcaatagacgggtttattgtacttgatgaacaattgcaataccacaaatacaaatggatgcccactgttgagttgcaatatgacgcagagaataacgttttaaactcaattgacggcccgttattaaatagaactattgttgccgacacaccgttgatgcacaaaaacgtgtacgaatgcgtttttacagacactgttattaatgttattaaatgtcggccggatagaattgtgccttctaaagtatgttaagtggataaaacggacaatcggacaaatgatgagaaacacatctatcgctaacaaatgaataggcattgtctgttgcacacgaaacattgtaaaaaggaatagaaaaataattgcaatgcattattcgattgcagtcccatggcaccgcgtatgtttgacgaggctgactattacacaacggtctaataaaattttgcaattgttctacggttgcaatttcggatggaaaatacattggatcacctaaaggattaggacttggcggaggtgacggcgaaggtgttggccaaagtgttggagaaggcgttggcgaaggtgttggccatagtgttggcgacggcgttggcgaaggtgttggtgaaggcaaaggagacggcgacggcgttggcgacggtgttggcgacggcgttggtgaaggggttggcgatggtggaggcgttggcgaaggggttggtgaaggggttggcgatggtggaggcgttggcgaaggggttggcgatggtggaggcgttggcgaaggggttggcgatggtgaaggcgttggcgacggcgttggtaaaggggttggtgatggtgttgggggtaaacatttttcactgttgcacttattttgttttttaatagataatagcaattttagtattagtattataataataattaagtttagcaatgtaaaccataacaacatgcttaataaaaatattaaatgtttaaagattttttatattgctcccaagtcattcgttcataatgcgcaggcggcgttttgttgcgttgaatccatttgtaatcgttaatatgattgtgaaaagtcatactaacatacgccattaaatatttcatcaaaatatttggcggtaacgttgaatcgatagcttgtgtttcttcgcaataagagtttacaaacgttatgggcaagttatgatgctctctttctaaagctagttctattaattcaatgtggaatataatgtaccctttgacgttcatgtaatggtcgcgacacatggcgcaatggagtataaaaaatatgttgtagaaaagcactttcatagttttaagctgttgcgtaacaaagtctaaactgcttttgtcgcgagtaagcaccatgtcgtcaatgatcagactcaaaaaatgaatagtgtcccaaattgtggtaaacgtgtaagtaaaacttttaggttgacacgaacgcaaattaagttccgccgttttgtccataaactcaatgcggaactgctgcaagtcaatgtttggcggcgcgttggcggcccattcgattaattgctgaacctcgtatttttgcacatctttatacttcattaaacacgcaaagtgatatagataagttgcttgcgacgacaacagtttagttaaatgcgcggatttagacgcgcgcaacaagtcaattaatctaaacgcgtacagcaaaaagctgtccttgtaacgcgaaaacagcggcgtaagcggtatcatggcgcacaaaacggtgcgtttgtttttgtgcccggtgccgtcgggaattgctttaagtattaacgacgctgacgccgatgaaccaattatatactttgaaaatattaaagaatgtttaggcgacgcgtcgtgtgacaagcttacctactttgccgaacttaaacaagaacaggccttatttattaaaaagctgtacaagcacatggttcttaagaacgacggtgtttacaataagcaccacgtgttattcgatttgatggtcatgtataagacgtatgtacaattggcggacgagtcggcttttggcagcaacgtgttgaagtactgcgaagactttattaccggcgcgtttgaactttttagtttgggaagccgaattgcggtgtcggtgccgttaggttgggaaaacgataatttaagtgtacttttgaaacatttgcacggcctaaacttgctaacaatcgacatcgtgcaatagcaacatgtggggcgccatttttttgttagttttgctggcatttttgttttatttatggtggaacggcaaactgaacatgaactcgctcaacgaatcgtcacctagtctaactcaaagcagcgattcagtgcaagtcgatccggaaaccgaacagcttaacgtaaaattaaacaacaacaaactaacatacatgcgtgttgcccacggtgataataaagtaagtcaagtgtatgtggccgacaagccactgtcgatggatgatattgttaaacaaggcaacaatcgcgtcgaaactaactgtgtgtttattggcacaatatatgattatggtgtgcgttcacccaacgtgcccgggtcgtccaacgatgtgacagtaacgcgcaccacggccaatttcgacgtcaaagagtataaaaacatgtttatagtaattaaaggactaacgcctggcaaaatgactaaagaagataacatgttgtgcttcaccgttgacagtttgcacgtgtgtctgattgacgccaacgccgcaccgctgtctgagcgcgaattgcgtgagctgcgtcgttcttcgtgcacgctagtgtacacgcgaaactcggcggcgcaacaaattttgatagaaaacgggtacacggtggtgaacaccgaacacaccgcctatttgaagaatcaaaaatcctacagggagttataaataaaacaaaatgtacatcataaatgtttattaagatttaaaagttggcgcgttagtaatcatgtctaatttgttaagcgccattgttaaattgttaaatttgcaatcatgactatcataattgtttttaaacttgtcttttatttgctgcaataaaatttgttcatcaaacacaaagcttttactgttaccagcgtttatgttcttgaaagcattataatgcgtaaacgaaggatgtaaaaacgatttcaaatgttgtgtggcgtacccaatcatttcttgcattttttcttcagtcacaaacgcatttgcagtgcgaggcgccgttttaatgtttaacatgtagatgagcgcgtacatgggacaattgttgacgctgagacgcgtcaaattgtgttggtgaacgggatcgttgtgtaacaaggtcttgtaaggaatgagaccggtctgcggatcgcgtcggtattttacaacgtgggccaaaaacacgcgcacagaatctttaagcaaatccaccaccattggctcttgcggataccgtttggtcataatgtgatcgtacacggaaccggaaaatggcaaatctgaaacaaatttgtgatccgtattgacaatcaaaaaacgttcttgaacgccgtcatcgtaatcgtccacgtacaatggcttgttgttaacaattaacattttgtaattggcttcgtatctcaataaaccttgatatttacgactgctagtgttactttttatagaatcagcgtttttcttgaaaaaactttcactgcatttttttaattcatttattgtgtataattgtgaattaagtttgctcacttctttgtcgctggtttctttcgcctcgcccgtgtgcgtttcatcgtcaaacttgtgcattaacactaattgatcaagcaattcgaagaaagttgatttgccggacattggttcgccgggcaaatacactgctttacgtccgtaatcagtcggcgcaaccaaactggcggcaaagtgcatcaacataaacgagctggcgtgattaaaattggtatagcgtttgaaatacaaataaccttctactacgctttttacatagctgatggaataatttttcaaatccaccttggacaaaacaacacgcatatagaatctagtcaaccaacttgacaagttgtccgaatcgcgcgccaagattgttttgtcccaccacaaatttttgtatttgtgcaatatgttggtggtgtttgcataatgtaaataaaatttggcaacaacgctgtcttcgttaggcgcgacctcagtagacacagattgttgcaaattgatcataaaagtgtcgcgatcacacaagtcggccattatcgtgtctataaactcaattttgtgcaaatcacgatgcaaaatggacacaattttaacgtgttctttgacaaaaaattgcgcatgttgattaacaaactcgctcgtggtgagaagcaacgctgttgtaatgtacaacttgttattggaaaaaattaacatccacatcaattgggttaattcaggatcactgataaacaaatctatcacaaggcacaattttagggccatgcgattaatttttatcttgcgcacacacttgcaggccgagtttttagcgccggctcgacacgggttacatttaaaattatgcacaatgtcttccaccttgatcttgttcacatacaacgccagcgttactaggtcttcgtcgttaaaattccacaactctctaaacaactcatttagttgaacgcgagtttccagctgacacggcgcacaattgcccaacaagttgaccgtaccaatattcactttgaccattttaatatctcggcatagtttggccacgtggtaggttcttagaatgtcgcgttcttcaacgctggtatttaacatgtgcgcaaacactgtttcgggcaaatacgggggatcgtcaggccgcttgaatgtgccaggcatagtagtgcccaacaaaaatggacaattagagtaaaactcgtctgtaatcacgttgtacaccccgtattgagtgtgatacatgtacttccaattattgaattttacattttgcaacttgtgcggattagttttaatcaagcgaaacaagtcatcgtctttcttcacaatttggtaatgttctccgttgaaaattagcatgacttgggtgaccacattttccacttttataaaaaaagcttggcccaacacgttgagtggcacttcgcaatccattgcgtttttgtgcgtaaacgcccacacatcgtcgtattcgttattatcgtttgcgctcaattttaaatagataaaataatgcgcaccgtaatacaagcccaagacaaaatacgaatttacgcctctaaagcaatgccaatggtcacataaattgttaaatatggtaacgctgcgcgtcataaacggtttacaagacgcgagagcgattattaaagcgtctttgtcgttgccgaataacgtttcgcaaacaagttcaaaaaatagtttagcgtcagtttctctaaaacttttcttgtctttctttgtgatttgtttccatatgacaaacagcaaaaaatgaaagtttttaaaattgctgtcttgtaaatacttttgtagcaaatcagtgtcgtcagcaagattgttcgaggccaatactttaaccattccttctcgaattttaagtagcgccatgtctatttcgttctgtattgtctccgcgttttcactgctcgccgaaataacaagggtaacattgggcgtttgaaagccgccttcttgaacaattgacgtcattggactgttatttgaaaactcgcgtaattttgtcaagttgacgttaatgatgtgtcggtatttgggcgttgtaatgcattgttccaagttaatgttgtcacgaatgacatgaaacaaatttttatgcgagttgactaagtttgcaactactttgcacgtggcagtggcgtcgttggccatttttatctcaaacaaattttcgctcttctcatcaaacaacgatttgccgttgacaaataacttgacgggcggactttcgttagtacacaaactcatttctatgttgagaaaggtttcaggattaaacacgaacaaattgacaggtcccagttgcttgttgtgaataatgggtattgtcgaatctatactgatgccaaattttaaatacaaaaacaactgccatccagtgaaagacacggcctgcgacgctggccagttgggccaataacaataatctccagcttgtacacatctgttagtgtgggaaggattttcgctgttcataaacatatccagtttcaaataatctttaataacatcgtaatgttttttcaataaaaacggttttacacaaacgcaaaaatcgttgttttccaacacaaacgaatgaccaatgcaactaacgcgtttttcatccatggccatgttttcgttttcatcgtcatcgtcgtgacgcgatttggtccggtgatttgcacatgatccgccaacgccgcaattttcaattgtgtttaagaactcgcgaaaattgtttacatgttgaagcagcttccgcgcgcccgtacgcgtgtttttgataattaattgactagcatcccgcaaactattgacagcgtattcgttgtcgtctgttacatccttgaacaagcgaggcaaaatgttatccattatggtacttattgtgtttctggtgacactttttatgtatgtcgcgctatctttgaaaaatcaccacccatttttacaaagaattgaaatatttttacgtgattttgacaacacgttgctgtacggcacgcacgtacaaatttacgacttgagcacacccgcgcgcaccgaacgactgtttattattaaacctgaaaacgtagtgctgtacaattttgacaaaacgctctattactatctagattcggccaacgtgttttgtcccaatgaatatagcgtgaccaggtttacgcgcgccaccatccaaacagttaacgacacgggcgtgtactcgacggcgtgcacttcaattggcagtttgacattgattgaacattttactggactcaaaaacaattcgcccgatcacacgcttgtgctggacgccgccgagcagatccagtttaccatcatggacattattaattatatgatatataacggatttgtggatttgtaaataattaaacaaatttattcatataaaactttattgttcaagattttttagacaaacgttcctgtatttggtgttttcaacacgcctgagcgatgttctgtggttcaatacattttaataaaaaatacagccaacaactattaaacgattaggccatgttcaggttacattgactgcaaatacgcgttatgtattctatttaaatgtacgaattgtcgtattcttcaatgttgtttattatttggtcgtggtattgttgccagtcgcgcacaggaactgggcatcgcttcacgcgcacgtagtaatcgtacgcaaaatcgttgctgggaagatcgtcaaccaacgtgattgacttaaaataatttacacttttgttggcaagaattttgataacaactttaggcgatttaggtaaatcgtcaccagtgtgcgcgtgcatgtcaaaatcaaagttaaacggtataaaatgacttttgtgtcggtaatctgttgttacgtttgacgacgatggcgaatccttggcagtagagccttcgcttataatcacgtcgaaatacgaagtcagtttgaccgcatccagagaatgcgctacgtgttcgcgactgccgtacgaccacaacaccaaaacgcatcctaaattgcgcaattcatctagagtgttgtaaatttgcgaatcgcggatttggaccaatttttgttcagttattaatgtactgtccaaatcaaacacaataacgtgcgggtagccccatataaacgattcagttttaagcagcggcacttgatactcaaacagtacataccattcgtcaagacacgcgtacatggccggcttgtgttgaaacacgcacatgtggccaagcacgggcgttttgaatatcgttttaatacagtggcgcacttcgcacatgtcatcttccgcgctaaacacttgcaaacaatagcgcgggttggccgcgatgtcgctgcagacctgcgtactgccgtgtaattgaaaaaatacgtattcaaaatattcgtatttttcaaatcctaaatatttaagatcagcatattcggtcacagcaagaacatggcctttgtaaaaagcgttacgcagccgcaaacatgcccacctgcacttcataacgaccagtggacgccgcgaaccttattcacagtgtttgtcgagtttcgtttaaacaaaaactatgcagatttgattaattttttaattaaaaattttgcatcacatgtaaaaaacaaaacatttaattttgctggtacaggtcacttgtttcactctctttacgcgtacgtgcctaacgtaagcgaactggttaaagagcgaaagcaaatacgactgcaagttgattgcgtaacgcgattgtttagcaacacgaccaacgattttaaaatgtacgtggaattgtttgaacacattgataactttgaaaacacagattgcccatgcttattattacagcaaagcatgctaaacgccaaaggctacgttgacaatttaaattgcaaaagatttgacattaaaccgccaaagtttaaaaaggaaacgtttgattccatattgtgcaagtattcgcttaactacaaaagtttgttgcttaaaaaaaagcaaaagcgcagtataaattgctccgtaaaacgtcaaaagaaaattaaacaccgtcaattgttaaacgacaaaattatttatttacatgaaaacaaaactttaaataaatgttcgttgcttcatagttttagtggtttgagccttaaaccgtgccaacacaagtttgccgttgttgaaagtcaaacgcgcgccggcgacgaaatggtttcctttattaaatactgccaactgtgtcaattgcgagctaattagtaacggcgtcttctgtatcccgtgcggcgagtggctgatcggctgcggcttcttcggtacgtgcgcggcctgccaggtcgacgtttgtagccagagcttcgtcggcgtcgacgggtgtacgtgccgtctgcggatcgacgtctgcggtagaccatggcggtttaaatgaagcttcaatttttaccttactattattttttgcgcttattgcccgtacctaaataaatatttaattcatccacgtcttcgtttgttttatttgcatgccgtttgacgctttcggcccctttgaaaattttgttgtaatcttcaatgtcaaacttacaattggccattgcataattctccatggttgtgtaaaacatagagttggccgcgttataatacatgcgcgacaacggatacggatctaaatgtttaagaagtttgttgataaattcggcgtcgtcgcaatagggaatttcggtgccgctactaacgtattgctgcggttgtaaattttgaatattactaccgcgtttcaccaacaattcgtccaaagtggtgcgtttgtcccggctaagcgtttcaccttgtaacagtacaattttagcgtagcgcattattgggctggcaaaacaacgggcaaatgaacttcgcattacgtctaccgttgtcatgtcgatcgaagaagacggcatttccagcaatgttctcaacgcgtccaacagcgtgttactttgaacgtctgttaattgcggacggcatgccacttcgtcaaacgcgctttctaacattttaaacaacgtgtgatacttatcggaacgttgtaaaaatatcatagccatgaccacatcgcgcactttaaaatctgtagacgtggtcgtgttcaaggtgtaatgttggatgagtttgcgtgttgcaacgcgatatcggcgcatgtcaaccaacgcgggcgttgttgcaacgggcgcgggcgcaaacgcgttaaacacagtttgtgaggctattggtgctgcaacaattgacgcgtttggcgcgacgttgcccgccgcaaattgcgacgttatagcggcgttgttgttagttaacgcggtctgcgctttgcgcgctaccgtaattaaaaacgtcattagagtgtccgtgttaatgttggtgtccggcacaatgtcgctgcacatacgtaacaactgaggccaaatctccatttgcatgttttcatcgacaagacgccgcaaattgtcaatgcgcatgtgcacatcaatcacgctcatggcggtggcttatgaaatgtttaccacttcaagttgattagtgtacacgtcgctaagaaactgcaacacgttgaccgtgtcttcacgattcaacttaattgtgggcgcgttcgcttgcagcgactcaaccagcttgcgggccgcgatagattgattgcccaaagtggtgaggctgttgatttttttttcagacgcgtcgttaacaataaacgacgcggccgtttgcgcgttgtttatattgtgcaacatgtccgcggccgccaaacgcgcgggagatcggttgcgttcttgtgaacgccgacgacgccgcggcggtgtgtcagcgtcatcatttattgaagcaatcatgattaaggtcaagtagcagcgcaatttcgctgtccaattggtaatcaacaattattcgccttataaacgtttcgggtacaattttgtcatacaacaatactttcatcatttcaatcttgatctgtttaagtttttcaacaagcacggccacatctttgtctgaatagcgttttaaaatgtaacggcatacattgtgcaattctaattcacccgcggaacaaggctcgtcgctcatgttcacattgtgttcattttgtaaatggcttcgcatgttttgcaaataatgatgaggcatgctttcaatgtaatgccgcagaaaaaaccctattagtaccgaggccgcaattttattaacttttttaatttttgtatgctgacccattttaatcataaaatttttaaacggcattaataaacggtgcgcattaggtacggtggaagcgctgttgcattgctcgttaagaatgcttaacaaataaaaacggtctttgaacggcaacaagtttataatgcgtttgcagtcttttacaaggggttcgcacattttgtgcttggtgtgtagaccgtacgctttgtcgcacaacaaattgtagaaaaattgaacaaacatttgtgtcaacaaattgttttcgtttatcacgtcgggctgagactgaaaatcggtttttaatattacgtacattaaaagcggcataccaagtatgggcctcaaaaaaatgtcccatccgtcttgcaaacccgaatctagcgtcgttaacgcgtttgacaaatatttgcatttgcacgctaaacaagacactttgcctacaacgcggcattctttttcacacatgaacgcgtgtacgtcaggtgcggccaccggattgtaatattgctgcaaatattctataatcatcctaaagtggggcacctgtttaacaaattcgtcgcgcaaaaacatggacatgatgcttttaatgttgtgtatgttgtccgaattatgctgggcttcaaatcgagttttaatattagttatacatttgttaaattcagtaaaaaaggtaagaccttttacgtcgatcagttggtgctgatcgaaatattttgcaagcaaaaaagttaaagaatcaatttcgtgttggtgcaattgcgcctcaaagcgcaccaattcatagcaatgccccgcttgagacattgcgctaaacctcaaattgtacaataatttgtaagtgtgcatgttgcattcgatataaccttataaaatggacgacaacaataactcaatattaattgccaagcttgcgggctacattctaacacaagatgtgacggctgtggaccaaataatgcacaccccagaaaaatcactaaatcaaaaattggatactttattagaaatgatacaagaaacgccgcttcgaggcgacgtaaatgacaataatgacttgatatcttttaacagtgatctattggtacaaaattacaaagtacggtacaatacgtatactacagcgcttgcgtttttacaaaacacaccacaattaaacattgatcagcaactattggacaaaatgcaaagtttagtgcaacattataaaacatacataactacaaccacggtggacaaatttgtggtggacgatttgctaaatcaaattgaaacaacttacggcgaaatacgaaattcgaaattaaatcgttttatgaagaaactaaaaacgcctgccagaacagacgctgttgccagcacaagttttaattcaccgtccaccgttgaaccaattgctagcacaagctttcaatcgcctaattataccaatgcgacaaataacgctacaaattttacaaacacctttacggagccaatgaaacaattgtatacattaattaacaaatataaaattaatccagaactaattaacaacattaaaaatgcggaaattaaaacaattgtaacagatatggtgaatgatgctgaattgtcatttgatacaatacaaatgcatcgcaaaacctttaatacgcttgaaaatgaagacacagatttaaaattgttgtttgatttgtacaaaaatcaaaacgccattacgtttattaccaatgacgaagaagaataccaaacagatgtagaaagcgaagatgaatcaattattgcagaaggtccttttattgcaaatgaacaagatattgacaatttaacaattgataaactcgttgattatatacgaaaaaataataataatttacaaactaacattagcacacaacaatcgattggagatatgcgcatttttgctaaaagtttatggcgacaaaaaaatttacctaaacatacacacaaacgcggtaaaagaacgttcgatgaagaaactgtgccaaatttgcaacaaccacctaaccgacaaaaatcttctagcaacgaaaaacgcaaacgtcgcatatctcgcaaattgtcgtccgaagacgaacaaaacaaagatgacgacgaagatttaattcgccggcgcgaagaagacaaaaattttttacacctaaaagctttagaattgtccaagtacgccggtgtaaacgaaagaaaggaaaaaattgtacaagtaaccaaagccatgcaagaaatgtacgattattgcaattgcagaagcacaattaatggcccacctaccgcggttgcctttgaaaaattgttaaaacatctaaacatgtacaatttgaaccatgttgacatgaatgttaacttttacgaattgctgtacccgttgactctctacaacgacgagtctagccgtatcataagttacatatttgcgtcggccaactatttttacaactgtgccaaaaactatgaaattcttcgcgttgaatttaacaaatacggcccgtttgcacaaatagattccatggtcatgtttgtcatcaagttcaattttttgtgtgatttgagaactttttttggacaattggataatataccaacgttggcctatcctaaaccagctatacataacgtgctaatcatgcgtgacaagattgttaaattagcatacaacgcgttgcaatacaatatggtagccaaatcagaaataagaaatgaccccaaacatttgcaacgcatcattatgttaatgaacgcagattttaacataatataaaccacatttttttgtaaaaaaatcatttatttaataaacaattacaaaataatagacacgtttgttaaacccagcaagtttataaaatccaatttaacgccaaccttttttgatttgctgtatttaactagtctaattaatcttgttaacgtcttgtaataaagttattctacacaactcattttaacgaaatgatctttaacatttaaattaatttgaattctacgaactgctaaacaaacaattcggacaagcgtcagtgtaattggattttatagacgtatatttaactcttcctttgatcacattaattaactggctttgacgtcgctattccaagtatcaattaatttatactgtctctgtttacaaaagtttgttataatccacatattcggtaaccggcatttgacacaacaaacacggtttgccacacatttgaacgctgcagactgtgcacaacgtgtaatgaccgcaaggcgctgccaccatttgtttttctttaacaagacataaaatacatttgtcgtcgtcttcgtcgtcgtcgttggtacacacgcgtgtaagcgtcatgtttttaattggtattgccgccgtaacgccgcgtggttttatgttataatagcatttagtgtcacggcaaacaagagttatagcgcttggtgccactttgtaaatggcaccttcgcaccgcaattgctttaaaaacgtacaattggcatctcgcctataggccggatcatctacgcgcacgcgcagttctttaccacaaattaacctgacgtgcaccattttacagattaaaaattattataaacgtttaaaagctacactttgctttataaccggtggcccgttttgcaatataaatttaagacgcagtcaacatgaacgcaagcccggtggacgctcgaattattgacgttgatacgtttgcgcgccaactgatcacggacaaatgcagcgaactaattgaaaacgaaaatttgttgcctgccaatgtttttcacattgtaaaacaagcgcgagacaaatattttgaagacccttcgttaaaaaattacgaatatgtaaaaaaattgtttttgcgcactaaatacatggacgactccattgactacaaaaattttaatcgtcgcatgttgctcattgtgtttaaatttgcgctcaacaaaggaactggttactttccatcgtacaaagagttaatagaggtggcaattaaacggcttaacaaaataaatcctgacctaaaaagttctcctcgagctatgctacaacattacaacgaatgccttgaaaatttggataatcccgtcacagatgaacatcatctagttacgtttggtaaagaagtggccactaaaatatttatagaagcattcgaattcagttatgccggcgctaacgaaattaatctaaacactggcaaagtgaaacccgacgtgtttcaagccgaacaaaaattcttgtcgcactcaacgctattatcagacgtgatacttgatcgcaagcgcaaattacaagaagctgaacttgacaaacaaaaagaatcggcgcagcaagtaccaaagcaaccaattcctaataaaacgcattttaaacaaacgcaacaaatttttaaacaaacaatattagcgcgtgaaccattgtttgtcatataaaaatttacacttgcggtttaccaccataattttgtaacaatgcctgttcaaaatgtaaccgctccgtttgtgtgttttgtgcgttaatcaatattacgactaatagcgtaaaaaacaacacgatcattatcactaccaaaaacccacacaatattaatacaaactctgtaattagcgatcgattacgagtaacaaattggctcaattgatcaccatccgtaggcgacgtgtgatttctaattacgtcaacaatgggattaccagcacgaccgccggtgagtcgagccaccacataagacggtgtagccatagtcttacaaaaagtaattgtatttcacggcgtggatggcaacgccgctagtaaaaacaccgtctacggctacacgattcataacttgtttaagtttggtaacatcgtcaaaatccgagttatcaaatgtagtgtcggcgggattaaaatcgggcatgttaattggcacgctgcctcgcaccgtgatggcgatgctgtcatttttgcaaaacacgcgaacgcgtccgtttttgtttgtttccatatattgtccagtgtgcacatctagcgagttaagttttacaatgacaatgggcacaatttgatatggaaaaatgagtctttgaaatattttaacaaactcaacaatggtctggctacattcggcaatgtgcaaaagtgtttgagcatccttgacatattgcagactgacgcgattgacggtcgcgcaattagacgggatatcgccgcgcaacaaacgacgcgttcgttcccaattaagcttgttgtacaaaatgtcaatttcttcgtgcggcaagttaatgacatagcaagccggcactttgcgatattgaaatatacaaaaaatgcgttttaagctcaatatttttaccatggtggatgtctctagattaaaacatagcaaaaacttatcactctctgtcaactctttaaaatgcgccaacggcatttcgcaatttattggacgcaaatctttataattgagaggcaacgcgtgcgcgcgcatgtccacaagtttttttgatttcatcaaagctttgcaggctggttgcatttcgagtccgggatacgtgaactcaatgggacaagttgggttttcgtgatgcacaattagtgtgttgcaataaaataaattgttagttaaaagcacgctaaagacgcgtgtttcgccagcaccaatttctgtaataggcaccaacggattccagtacacaatagtggcgttgcttgttttttttggcaattgactgttaccgttataatcgtgttcatgtttgtagaccagcacggaattgaaccgcgaaaagtttcgtttttcaatataaagtttgtccgcgtccgtgggcacgtacacaattaaactatccatcggacggtttccgacatcgctttgcggttccaccaaattgtaaggaaacgaaaagaacctgtcgcttacgcagactttgatttgaaacggacattccatcgtaagccttatacttatgaaattggcgttgacaaattatttaagtttgtgcactttgactgtgtttagaagcgtagaaggaatacaattgtaatgataaaataaattttgtctaacatttgcattgtttattataattagcacacacaagtacattgcgtacaaaaacactattattaaaaaagtagccgacaaaaaatatctcatcatgagcaaaccttaaataaaaacaaattttttcatataaataacatttatttgcgtttgttttctttgttgtaatccttgttgttgcaaaatttgtattcgtgggcgcccggtgtattttctttgcatagaagtttgcgaatgaacgtcacgttttcgtacgtagactgggatatgttaccgttgtgcaatgtcgtaggcgcgagtgatttgcgcgcattgttataaaaataatgcactgagtaatccattgtgaataataaattttttaatcactccgcgcttttataggtgcagtatgcgcaaaccaattcgttgacaaacgttttgaactctgcatcttcgttcatctcatcgcccatgtacaaatctaattcttcgacgctgggtttgcacaaagagttgccacatttttgacaaaacaagtcattgtacgtgtaataatgcggggcgtgtaacgcgttgcagttttcgcacacgcgacaatattctaacagacaatcttgtaaattttccacaggttcgtcaatctgatcacacaattgttgcataatactagcccgcctatccaacgataaatgttcgttatcttgcaacatagttagataaaaactgtttaaagaatccaaatccgcgttccattcattgttaattttatattgttgtaacagcacgtgcacgtccttcatcgccgccattattaataaacatgcacgaatacacaagcactcacaaattgtttagagaaataatgagtattaaacgggcacaatggactatgatctggttgacattgtcaagtgttgcgctgatcatcagtttggcaagttatggcgctactgttgtcaacgaacagatgaacacaatatcactatctgttgccgcgcaaatttacaatcatgcacagctagagcaacgcataattaccgaactagctgccaaacaaaatggagaatttcattatcctttgataatccgttctagcaacgtaatgattcatgttaacacgtttgcgtacactcccagttttattgcggccgatgttgaatattattctgcgtgcccggccagtgccagatacgcgacatatctaaacaaattgtacaacttgttgcggccgcccgtgattagcaacgtgtttctttttgccggtagtcacggtttgggcaaaagttacgccagttttcaacttggcaaagcgctcagccgattcgccaacacggttgttttttccgtgcccatgaacacgtttaataacatcaacgatgcgggtgcgttaattgaacgtgttgaaaaagcattgggtaaaactagttttattgtgtggtcgtttgacgaactagattcgtacgtactaaacaatcgcaatgatatgcgcgacaaaactattacgcaatttgcagaatacacgggtttcgttaaaaacgccaaccgcgtgctcgtgttcacaatgaacaacgccgaggtgttattgcacgattattgggcagatcgcaagcgtattgaaacggattttttacattacgaacacgcaaacgattttaacaaagccattgaatttactggtttagagcgccgcacatttttgcaagaaggtcaacttagccgattgcattcgtttgtgggcaacaaactgtttgtatacgagccattcgacgcaaacgctgcgcgaacgtttgccgtccgttatttgaaccgagccaacgctcaacaagcaaccgccgctgtagaaactttgttaggcggtaattcgagtcgccgtttttcaataagaactttaaaaatagctttggacgacattgttaacaatgtgtagttttacataaatgccgtgtcgattgcgtcgtttctaaaattgttcaatggctctttgttaatatcataattcattaatgcagaaaacactttatgcggtggcattcgacacacttgagttttaagttcttgaaacatgttttcgtgcacgttcatcattaaatattttaaattgcggttatttatgttagttacaaacataagtatagcaaaatctaaagctgccattttgtaattattttcatagcctttgtaatttccaataatacgaaacggtaattttgatttgtctaaataattgcaagcgctataatacacatcaatagtgtgacgaattgcttctctggtaccagcacgtaacatgttaacaaacatgacgttgccaagtttaagttttttcttagacccgtctaatttgtacaaatctaacacgttggcggtggcgttatcgggtaaccaagaattgtacatgcaatacggaacaacgttcaactctaaatattgtgcgcacaattctgtttgttggttgccggaattggcaaattgcatactgttgcgcaacacgtaacacacttcgatatcgtttgatttggtttggtacgatgctttgtccactgtaattaaagtagaattcattttttctttcattttaatttgagcgccaggaaaagtatacacaactcgcacattttttgacaatgaaggatctttatttttcaccatacttaacaagcttagcaaatatttgtctaacgcgttaacaaataattttgcaacattttcgttttgcgaaacaaggtaccaaacgctgtttctcatgggtaacacggtcgcgtaacacaacaagcttgctaatttaatgtgtgttatttcaaaattgtttgccgactttatttgcgatattatactgtaatttaaaaatttgtttaactcatgatcgtacttttcttgtattattttgccgtttgcgagcaggtcgagcaaacgattttttatagcttgctttgaatcgttgttatatgtaaaattaattttatcctggttgtctaacagcaacattagacttttaatgtcacaatcgcgcaaatatgcgtctgcattagtaaccgtttttaaaatttccaacaggttttgtaactcattagccatgtgattttgatgtataaatttatcaccactcttgtttacattgttgtttaaaaactctaactcgttcacaagcatttgctgcacaaacgtatacggcgttgtgatttccatgtcaatgctctcttagtttaacacataatacaaatggccatttgtaattagtttttgttctaaattttttgataacgttcgctttgtaataaatgcagtcaataacgcgttggtgagtggtatgtcgcttaacacaaccacctccgagcgactaggatcaaattgcattttgtttaaataatgcaaattgtcccatttactaatgctaagacccaggtcgccgctatatggcgagtaccctataacaccgtcgcgttctaaacagaatccaaagttttcttcagtgttaataacaaatttgtaattttttagaatattaaaattcaacaccataatgcaatcgccgttgtacgacaatttgattgggtcgttggtggcatgtaatctaaaatacacaccgtcaacttcatcaaaccgttcgtgaaacgcgcgatcttttaacgactctgttgggtctgtagctaattttctgtttttgctgccttgaaatgacacgtttaatagtttagtttttgaagcaatgagtaacacattggaatctactattttatcaaaattggcaattgttgtctcgtgcacaagatgatacattatgatgccttattcgtacacgcgccgatacaggttggccatgcgcgacggtatgcacacaggcaatgtgcgtgcaagcgccgtttgttgaaacaacattttttcgtaagcgacagcgcagacgcacgcgtcggcggtaaattgcgtcgtgtctaaatttaattgcaacacaccattgtcgcataaataaggtcttgcggttccggtgtcatcaaccaggtccctgtacgtgcttacgcatgtttgtgcgacaacgaaatctccgccggccgcgtagatgcgcagtaagcccaacgccggatcgcagtagatcgttgagtccggttcctgggcatccgttaaagcattggttgcggtgcaaaagcccgcatcgcaaatcagctcgcttgctgcgctggcgatcacacaattgtctcgacattgttgactcgtcacgcacggcaaccgatttaatgcacaatctacacctcgatcgcgctcaaacacaaaatccattaatggcgtaaacgttgtttgatgccgttccactgtgttttgttgcataaattgttgtatagacttgaacgttgtaacgtacactattgcaataataacgaataaaagtaatagctgataaacggtgggcatgcttagtttttaattgcaagcatgtcgccacccgatttaacgccaatggaaaaattattagaaagcatagaaaatcaaattaaaattaaagatgaacagctacgaaaaaacaatgaaatgcttgagcggtacataatgttactggaagaaaaaaataaacgcattgaagaattgtatcgcagtttgatggaaatgaccgaccgcgttgtgcaatatcctgcaaaaagctaccaaacgcctatgctgtgcatgacgcgcgagttcaattgcttgcgcgccatcacgggtcaaaaagtacacgtcaataaaatgaaacgcgatcttactaccgccgccgaaataatcatcgattcggtacggcccaaccctcaggtggactttaacaacattgtcaattacgtggaatcagagtttaaagagaaaatgcgccttcgcaacaagcgtaatttaatatttgaaactgaagatgacgccattaaagtggccgccatgtgtaaatcattgttaagcaaaaaaggcaaaacttgccattctgcgcgtatataaacgcatggaatcgtttgttcagcagttatcatgtcgctaacggccaacgtgttgtacgtgtctaatacaccacagtgcgctgccagtttgaaaaaatacgctgttgctgaacaagtattttgctctactggagattcattggctttagtgttgacttacgacattattagcgatgaatacttagaagtgttgcaaacaatggactgcgactgtatcggctttttgtctctgaaaatgcaaaaaattgtcaaagcatacaataaatatttggaaaagtaaaaatggaagagaagcagtcatttctgtcgtggcaaacaaacaacaagaacaacgaaataacaaacagaacagtaacgccatactctttgtacgaagcagcaaaacgcgctttaatcaacagcaaagtatttgaaactcgccctcattgcattttaaaactattaccggcatcgctgaaactaaacgtgtgttatgcatttttagatgcaattccgctcaaaacacgttgtaataattgcaaatcattttgtttcgaccaccatactgcgtatggtgacaataaatttttttgtaataaatgttgtaacaataattgtttttgcaatgtgtgcttttttagtgtatgttattgtgacatttgtgaaactcaatgtataaattgtggatttaaaactttaatttgtatgggtaaagcgcgacgaatgttgggtgcggatattacattatttcatgtttcaaaatttgctcaaattgaagcattgtatttgccaaacactataaatataactaattttttgcaacgcaatcatgtaattgaaaaggttaatttgtgtactttagattgtttagttattgtgatgtacagaaaaccaaatcgtgataacaatattacagtgttagaacgatccacatacaaaaatgcatatgttctgaaacaaaaaattgttacaattggtgatatgtacaacaaatattatatggaataataaacatttgtgtaaaaaatgatttttatttatcgtaagcatgtatctcctatatcttattgtggttttactaattatagtaatcgcgtcagctattgtttacgtaaatttaattgacgtgcatcatgaaaacgtgcgttatccaattgaaatgtttgacacgagcaacgtgccgttgattgagccgccaaatgaaattgttatagaaggcaactcgcttgaatgccatcgaaatttaacgccttgcactacgcacgcggactgcaacgcgtgccgcgaagggttagctaattgccaattgttcgatgaaaacactgtggtgcaaatgcgtgattccgacggcaatgaacacgccgtaacaattaaatccggcgaatcgtattgctttgcgctggaccgcgaacgagcacgatcgtgcaacccgcgcacgggcgtgtggttgttggccgaaacaaagaccggctttgcgctgctgtgcagttgtttgcggcccggtcttgtaacgcaattaaacatgtatgaggattgtaacgtgccagtgggttgcgcgccacacggacgcgtcgccgacattaacagcggcgacattcgttgtgtgtgcgacgacgggtacgtcagcgattacgacgccaacaccgaaaccccgttttgcaggccgcgcattgttcgtgacgtattgtttgacgaaacctttttttcgcgcgcaccgtgcgctgccggtcaagtacgtttagacgatcccggcctaaatgattattaccgacgttattttaggcttgacgacatttgcgtgatagatccttgttctgtggatccaattagcggacgccgtacttcgggccgtttgtttcatcacacaactgcggacggtgtcgagattaatggttgcaattgccctgcggccgacgggttgttgcccgtgtttaaccgccacggcgtaaactctggcatggtcggtcatagtgatcgcgatgcacccaatgcgtgtttacaaccgtttaacgtgcacatgatctcgttgccacaaattgactacaaattcttttggggccgacccgatgcaaacgaagtggcggacgcggacgtggtcgtgcaagcgacccctgttcagctaagcgacgagcgctacgccgtcatgctgtacccgctgctaacgccgcatcctgacacgactacaatcacgttagcaaacaccggtgtgttaaaaatttccgtttcttatgatactatgttaaaaaacgcgcagttgcccgcgtcaatgttcacgttgttcaaaaataaagagcgtagtacgtcgcagccagattgtttttttcctggtcagggtcgatgcatcgtttccaacccggatgcgtgcattcgccgacacggtaatgcgcaagtttggacggcagaaacgtttagtaattcgtggtgcgtgttgacgcgagacggggccaatataaaaatttggagccgcgccggtcgttaccctcgcggcaccgcgcccgctgcgctgcgtttgcgcgggtttttcctaaccaatgatcgtgatcgaaaccgtgcgtgttgttggtacgggcgacatgactagcggtacccaaatagacgcgttgacgcaagtattggaaacatattcaaattattcgttgtaagacatgtacggatcatatacaatttttattgtagtgttgcctataaacacatacattttcggcactgtttaaatatttggtctgacctcgcttttcaagtagcaatatatttgtaaagcgagttcgcgaagcacatgagtcaccgagcattggcctcgcttttcaagtagcattatatttgtaaagcaggttcagagcacatgagtcaccgagcattggcctcgcttttcaagtagcattatatttgtaaagcaggttcagagcacatgagtcaccgagcattggcctcgcttttcgagtagcattatatttgtaaagcaagttcagagcacatgagtcaccgagcattggcctcgcttttcgagtagcattatatttgtaaagcaagttcagagcacatgagtcaccgagcatcgacctcgcttttcaaatagcattatatttgtaaagcaggtttaaagcacatgagtcaccgagtatcgacctcgcttttcaaatagcattatatttgtaaagcaggtttaaagcacatgagtcaccgagcatcgacctcgcttttcaagtagcattgtatttgtaaagcgagttcagagcatgacattagacatttataaggaaaatgagcatcgcccaagtggtggaagcgtgcgaattacatgcaaaatttgtaaaattgggctattattacagagctcgcacatgtctcgacattgcattaaacaatttgaaacaacttaaaagtgtgacgactattcaacaagttgcacagatgattgacaacaaagaaatgcaatgtttgaagcttcaacaagagttgaacacaaaaattaaaaacagaattcttgtaaaaattacagcatatcaaaacaaaccattgtgattgtgaacgcgtaaaatcaacttttagtaagcgttttaacactaagctaatcatataaattaaaccggtttgctgctttattttacagttgcttgttgtacaatattaaaaacatacgcgcgttgatcgcaatgggattgtttaaccagttttctcaatatacaaggctgccggccgcgccgcaaatctcgctggccgtcatgtcatacgtgaacgttaccctgtgcgcgtacggtgccattgttgcggcatacttgtctacggcgacttcatttgtcgaattgcaatttttggaatactgggtgatgctgtcgctgcttatcaacggtttaataaacgtgacgctgtttttacgccagtccaaaactgaagctcacgaaattgtgtacgagttgaaaatgttgcacgccatgtactttagcagcgcgcttgtaaacctagccataatagacaccgcacaaagcgccgccagcgcggtgttagtcaacaatttgatacattgtttggcactgtttctactttttgtagaattgactgtgttgcttggacacacgttgggtacctatgctaattaccgctacactaaagcgtgttatttggttgtgttgttggtgactgccgctgttacaattattatattaacagcagaaaatgttaaaagttcgccactatgcaacgatttactgatggcgtcttttttgactgccgcattcatggtgatcgccgtcgtgtgggcggttcgcaaagaagctgccggatctgtattgcaacgcgtgcaactaacatcgttgtacgaccctccgccctcttttaccaatgtaaaaatggaagacatgttaaaaaataaacaaatggagatttaatttgtttttattttataatcctatacattgaacaagtataatacgaacacaaggttataatattatcatctaaatacacatcgatttctacgtatgggcatcggtgcacatcgtcaacattaatatctataatattgcttagactatttaattcatttacgtgtttaacatctgaaacccgcactgtattcggtgaaataacacgaccttgttcgtgttcgtgttttaacaatttttgtatcaatgcaaaccactcgaaatgactgcataaaaattttaaattgttcggtgatggccagtttaatgcagcaacacgaacatgtttaggtatacacttgttaaaaaactcgcaacttttttccaaacacaacaacgccatgtacggcgttaatggattctcaaaatgtgccaataaatgtttatcgtctggcaggtgatagttgacaggcgttaaagccaaatagtccatcaatttgtttttgtgtagcagtctttttcgtgaacgcggcgttagtcccaaaacttttgcatgtacaactgcaggcaaatattgcaatatctcctccgcaatttcaggcggtaaacgcttcattgtgctttgcaacaactgacattagcttgtgaacatacagatttatatagcgtttacagttcgtctctcattttgaattgcgcgttcattgtgttgagcagatcaccattatcggcgtcaatttcccatgcaaacaatccacccaacttgttttgatcaacgtatctgcttttagccaaaacggaatcaacgctgtcaaacgtgataaggtcggctttatttttgttaaaaacatatgatgcttcggcaactttgtcaaacttgtacacgtactcgtttatattttcttttatttggcgatagtcaacgactccatcttcccacgtgcccgtaaccggaccgttagcgacaccatcaaaatagttatcacctttgtaatcagacacgcctgtccagccgcgcccgtacatggcgacaccaataattattttactagaatcaacaccttgttttgtgagcatttgcacggcatgatgcgtggtgtacaactcgttcgggttccattgcggggcgtatagtgtcgtttgatagcccaaatcggtatttgaccaagctcctttaaaatcgtaagtcatgacatatattttactcaaaaacttttgtgcagcgtcataatcgacaagttcgatcttgtcataaccggcaccgattgcgcttgtcaattcgtacactttacctgtttgtgcttgcaaatcatccaacatgtcacgcaactcttttagcaaaacaatgtatgtagcagcgtcgcgtttcggatcgccaatggccggattagcgcctttaccgcccggaaattcccaatcaatatctacaccgtcaaaaaatttccaaacttgcaaaaattctttaaccgaatcaacgaacacgtttcttcgtttgacatcgtgcataaaatagaacgggtccgacaaagtccagccaccgatggacggtaaaacttttaaatgcgggttggccaacttggcggccattatctgaccaaagttgcccttgtaaggctcgttccaagcggatacacctttttgtggtttttgtatggctgcccacggatcgtgtatggaaactttaaaatcatcgcgtcctttgcacgatcgttgcaaattttcaaaactaccaggtattgttttgagggcatcgtttaatccatcgcctccgcaaatgggtataaaaccgtacaacagatgggacaaatttggcagcggcaccttgtcgattggaaagttgcgtccgtacacgccccattcaacaaagtacgcggcgacggtcgcgttattgcgtctaccaggtttgttgttttctcgccaaacatattctagcggagtcaaatgaccaccgtcagtgtcagcgaccctaacaattacagagtcgctcaccgaacaaccatcctcgttacacaatttaacgcgcatgttaaaatgtccgcttttgttaacaataacagtggctttttttgcgccggcatcgcctttccacatttgttgttggtcaaacagtacgtaagcaatgtcgcccaattcgccattccaaacgttccagctcacttgcacgatgacactatcttgacgagtgaccaggtcattgtatgaagttgcttcgtggttaattttaacaagagcgtaatttcgatcggcccaatcaattactggcacgccgggcagcgcgtatgaaacggccgccagcagccacaaaatgtatatggaattgcgcaacatattaggatttccttataagttgttattattttttgtaaaaatgagcaaatttttactgtattggtttgtgtacggtgtcgtgtgcagcgcagcttacgacattttaaaagcgcccaattattttgaagaatttgtgcggcaatacaacaaacagtatgacagcgaatatgaaaaactacgccgatataaaattttccagcacaatttaaacgatattattactaaaaaccgcaacgacacggccgtgtacaagatcaacaagttttcggatctgtctaaagacgaaactattgcaaagtacacaggtttgtcgttgccgttgcacactcaaaatttttgcgaagtcgtggtgctcgaccggccgccgggcaaaggcccgctagaatttgattggcgacgctttaacaagataactagcgttaaaaaccagggcatgtgcggcgcttgttgggcgtttgcaactttggccagtttggaaagtcaatttgccattgcacatgatcgcttaataaatttgtccgaacaacaaatgatcgactgcgattctgttgatgtcggttgcgaaggcggtttgcttcacacagcttttgaagctattattagcatgggtggtgtgcaaattgaaaacgattacccttacgaatccagtaacaattattgtcgtatggatcctaccaaatttgtagtcggagttaaacaatgcaatcgttacattacaatttacgaagaaaaactaaaagacgtgttaagattagcaggccccataccggtagccatagacgcgtccgacatattaaattacgaacaaggcataattaagtattgcgccaacaacggcctcaaccatgcagtgttgctggttggctatggcgtggaaaataatgtgccgtactggattttgaaaaacagttggggaactgattggggtgaacaaggtttctttaaaatacaacaaaatgttaatgcttgcggcattaaaaatgaactggcgtctacagcggaaataaattaaacaataattaataacaaaaatttattaaacaaaaccctttattattaatacaatgccattatttttaaaatttaaaaccaaattaatacaatgccaacaccttaaagtttaatacaatgccaacacgaaattatacatgccaaaataatacaaaatcagaatacaatgttaatacaaaaataatacaatgttagtacaagaataatacaatgttacattaataatgacgggtgcgactgcgcaccatgcaaaacaaaaatataataacaccgcatacaaggaaaaagttgagaccgtgaccgaccataaacgaaaataaagtgctggtcaactcgccttcagccatgtttgtgatgtctttgaggctagtagtttgtccgccaaacttggtattttccatagtactaatcaagttgcttttttgctgagcaataaatgaccatccgctagcatctttccagctttcatgatacgaagtgttaccgatagtgggaatccaaaactcaatatcgtcgtcaatggccaattcttgatagttattaaaatcaatgcactgtgacgaatctgtgttggaaacccaacgaccctctttgtatatgctgttattatagcagttgctagtgtgtttaggtggattagtgcatggcattaacaaaaatgtgtcgtcagacaaaaatgttgattgcaccgaattacccataaggttgccaataagccgttcatcaattttggccaatgattttacaagatcgtgtataacattgttcatattattaatgtgctcgtgtaacaattcaatgttcatacgcaacatatcattttcgtatattagctcttcttgcaagtgcatcaaatcacccttggtagctggggcgccttcgtcgtgtttggcgggcgcgtcgtgacgccatttgttgggacgctgttttacgacgtgctcggacttgcgcttgatacacttgttaaatttgcaataccatacatttttactaaggtcataaatgtcaccttcaagcaaacaatgttcgcgcgtaacagtgtcaacgtccgatttgtcatcttttacaagcaaacaagcggcgttttgagtgcggcgactaaacttacttttttcctttagaatcatgctgacgccgtcacgatgcaagacttcgttttcggtcacattaataactgcaccattgatgtccaaaatgtgaactctgcaatcgtcggaatcgttgtcgcattcaaggcgcgtgtacatcttggcagttgacacgccgcagcgccacgaccgattgcaagtgtgatgcgcaaaatggttgttgttttggcgttttacaagctctttaccgcgcacccaaacgccgcgaccggaaaaatcgcgtaaacaatcattgctgtcgctgccccaacggtcaataaggtcctcgcccacttcgcattctttgcgtatgccccacatcagcaaatcttctttactcacgtttaatgtaaccatactttccaagatacttgtgttgggatccagtgagccgccgttgtaagcgtacgcttgatagtaccctttgtagccaataattacgttttcgtccaagtccgtttcgacaatactaatttcaatgtctttttttaatgtttctttaggtggcgtaattggcaaatttttaatcttgtacggtcctgacttcatttgagcattgcagtgctcggcacctcgcgaaaattgcaccagcaacaacacacacaaactgattctatacattttgtacaacacttgtaatatcactggactaggcactggtaagcttgtagttactgtagcagagcacaggtaagactgatttacaagtttgttacaggcctttatatacccatgtttatcagcgctgtatcttgatcatggtttaatcacatacaatcaattaatctctagatacttgttatcttatatgtaaagtatattgcatatattattttaatattaaaaaattaattacattatctcgtacctataacagataaaaagataatacagttactatgcagataaggaattactatgcagataaaaagataatacaattactatgcagataaaagataatacaaactatgcagataaaaagataatacaattactatgcagataaaaagataatacaattactatgcagataaaaagataatacaattactatgcagataaaaagataatacagttactatgcagataaaaagataatacagttactatgcagataaaaagataatacagttactatgcaaataaaagaattaaacggttactatgcagattgttagtatcgtaacacgtatcattatacgtatgtgttatttaggtgattagctatctacctaataaacataggtggtaagttgactgataatattaatagttataagccggttgccttttaaatttacgtaaacaatataaaagtaatccaacaggtaatactataacaaaaaaagcaacaaaaatatatgtcaatacattataaaatttgctccaccattgtaaattagatttaacttgtacacaaaaatttttaatttttaattttacaaatgtttgaaaatcaacattttcaatcaaatctttgacatacgtaatgtttttagcggtgtatgtaaaatgttctttataatcgtaacggtgtaaacaaaaatcgtacttttcatttttgttgtatattgatatgtaattataataacgattttgatataaaagtatttcgtatgttgccgtgttacaattttttatttgcacaatgtaactacaacgcaccgccgcaaacataatgacaagcacaaacgtactcgtaagattcatgactcattaaaaattttaacgtgctttacacaatcgatcgtgctcgaaaaacaaaatcacccaatgacgtaataaacacgcgtgttaaattaagtaacaatgaacaacaattcggaaacgttggacgacggtcgcacgttcacgtacgcgcctgacaataatttagaagtaattataataacaaattcgcctaacgactacgacggctatttagaattaaatggtgctgctaaactgttagcgccctttttacacaagagcgccgctgctttgtggacaaacgcggctccgtcccataagttgatcaggaacaacaaaaactacttgcacgtgtttggtctgtttaaatatttgcaaaactataatttacacgtaaaatcacaccatccggttgaatattatactataaaatctattatttgtgaccttttaatgggcgcgcaaagcaaaatattcgacccattgtgtgaaattaaaacacaactttgtgctatacaagaaagcctcaacgaagcaattataacactgaataaccatgctgctaacccggcgccggtcggggaatcgcgcgaacttatcgaatcgttgcacgccgactacagcaacaaactgacgtttgctactgacacaattttagacaacgtaaaaagcattaaagacttggtgtgtctaaataaataaggtaaactaattatgaatttttgggctacatttagcgtatgcttggtggggtaccttgtgtactctggccatttgaacagcgaattgcaagaggtcaaatctatattaattgtggcgtttgaagcagctgaaaaacaatacaatggaatggtcgaagaagtagaatcattaaaaaccgacacgtttgtaatgctgtcaagtttgcaaaataacacgattcgtacgtgggatgctatagctagaaatggcaaaaaaatttcaaacctagacgaaaaaataaacggtttattagcaaggcacgcaccgaccccggcttaacactataagtaattatcaaaaaatttacgctgcatctacaatatcgtccaatatgtcgtcctgtatgacacctaacaataacgtcatgtttgacgacgcgtcggtattatggatcgatgccgattatatttttcaaaactcaaagatgccagtgtcgacatttcaacaactgttgttttctattccgtcaaaacatcgtaaaatgatcaatgacattggtaacccgccatcgtgctcgtttccgcccaacaacactacggtcaagtacatggtaaacatttatggtgcagcggtgctagcgctgcgctgtccatcgcttttttccgaccagttgctgaccacgtttgtggctaacaactacatgagctactgcagccggcaacgaccgtgcccgcaaccgccgcccgtaccgcagtttgattgtgcgcaaagacagattatggacgcgttggaaaagctgggccatcaaaacgaactgctaataactggcgttaatcaaatttcgctcaaccagtccaatcaatttttagagttgtccaacatgttaaacgctttgcgttcgcaaaccgcgcaaattttaaccaatttagaaaatgcacgggacgcgattataaatcgtatcaacgcgctggtagacgaaatcaaagatgctttacctgatcaatccgagcaattgcaagaattagccgacaagttgtcggatgccatcaatgcagttgcgcaaacattgcgcaacgaaatgaataacacaaattctattctaaccaatttagcgtctagcattaccaacatcaacagcacgctcaataatttgttagctgcgatcgaaggcattacgggaggagaaggtggtggattggaagaagcagatcgtcaaaatttaaactcaattttaaatttggttaccgaaataagaaacattttaatgggtactcgcaaataaaatgcctagcaacaaacaaaaaccaaaggtgccgccgcgcgcaaagttagaaaaaaacaaacagtttaaagcaacgcagcaagttcatgaaaaaattgaaaagtttagtcgtaacataaaaaaaactctaaaaccagcgcagctcgccgcgttcgtaaacattaattttgacctgccgacagttgacacgtcggtacaaaacgcatacgaccatcgcaaaccttccatatttaatgatacaaacgtgcgatcgtttttagaaaagaacacgtttgttgtggtgtttgctcaccctacatacaatatagaatataattcagttggcaaaaatggtgtcataattaaatgtgctaatattaataaaaagctgctgtttgaagatgaaaacaaaaagttattaaacgttttgcccacaagcacggcatttcgcgtgcagataaacaatgaaaaccctatgcacgtagaaagagttacgtataacgacaataaattggaaatacaattaaaaatgtcaacacaattgctgaacaaactattgcctatgttaaaatgtgtaatctattttaacattttgacaacaaaccaaacgccatggaacgtgccggatgagttgtttaacacgtttgttaatttaaaattgcgcacgccaaattatactttgtaaattgctgcgagtaacaatgcacgcttttttgactacggagcaacgcttagtgtacgacaaatacaaattagctgcgtacgcgcgctccatcaatttaacgcgcaagcagttagatcaatggcgcgattctaaaatcatcgttccggatcccgtgtcccgagaagaaactttgcgcgttgaggcggctacgcgcggtcaaagcaaaaatgacttgtggttttgtttgcgttccgatcgcagcaccgcgtcacgttcatcaaacagcacgggatcgaacggtatagggcgcgctgcgcttgcttttgcttttggcaacgcgcaagaagacgtggtcaaaactaccaacgcggaattatttgtgcaacttgaaagtttggctgagcaacgagttggatgcgcggtgattaagacggtgctaaattgcggtatgtttcttagcgcgtttggtttaaattctgcgtcgccagacgcctattttgccatggctgacggtacgtgggtgcccgtggaaatcaaatgcccactaaactaccgtgacacgaccgtggaccagatgcgtttggaattgggcaacgctaaccgtaaatatcgcgttaaacacacggcgctgttggttaacaaaatgggacctcctgaatttgaagtggtcaaaacacacgatcactacaggcaaatgcagcgccaaatgtacgtgttaagaaacgcgcccgtgtgtttttacattgtgcgatttaaaaacaatttggtctcagtgtcggtgccgcgcgacgaaaacttttgccgcaaagaagcgaacacggaagcagcagcgtttgttagttttgcattggcaaacgctaatcgcgcgcaattcaaacgtgcagataatcggcgcgcatcgtttaacgcaaccgaccattgttacgacgccgcacaggtgaacgcgttagtgcttcgcgggttatatttgtcgtacggtcaattaaaatgcgcttattgcgaagactttacgttggatagtaaagcaacgttcgagatggccgtcacgcggacgcacatatcgtgcgattttgcatcgttacaaatggacgagtttgacaacaaggcgttttttgattttgctaaacgttacgccactttaataaaccaatacgaaaacgcgcgtgcgcttgcccattttggatactacgcaggtgcagacggcttaaaaacattttgttgtggcgtgcgcggtactgtagaatcacagcatcatgtgtctacatgttcatattatataggtataataaagaaaatgcaaatgtaattgtggtttaattggctacgttgtagtatataaaagggctggctgtcgacaaaaggtattcacaaacgttttagtagcaacatggttaacaccgttgtacaagagcagaaatatttgaaaatggacaccgaaatcacatttgaaaaagaaactggcattttgcgaatgggcaataaagaattgtttgtgcatgtatttaagcccggtcaagaggtgttcgacgaaacgctcaataaatatcaccaatttcctggagtagctacagacgtcatatttccatcaatacaactcaacaaatcggaattgaccgtgtttaccaccagcggttcgtatacgggcataccaaacgccaaatgttttaattttcacgtgtgtaacaaacggtttgtgtttggagttttgcctgcgctcaaagtgcccgccgacgttggtgaacattttagtattggcgcacctataacatgtaacaacaaattggtgtctgtggtgacggctctgcacaagcaacttgacggcagctacttggtgccggtgactggagtgcgcgaaacttcgcttgtgtctggacacgcgcatgtgcgcaacggcgtgcgcactgaacgctggcttgctgatcgagccatctacggaacaatgcagttaccgtacaatcaaattaaagcatacgccatggcgcaggtggcgccgcccgctgatgcgctagattcgtgcgtgctgttttacaacaattcagaagtgcgcattacttttaacaagggcaattttgaattgcatcattggcgtgtgccaggtcctatgtgcggtttttaataagcactattattaaactattattatattaacaaataaactataatatcacaatgtccaagcccagcgttttaactcagattctggaggctgtcaaagccgttgacgataaacttgtcgccctgcaaactcaagtcgaccaattaacagaagattccaaaactcttgaagcgattacagaccagctcggcgagctggacaataaagttactgacatacaatccatgttaaacgttgacgatttgccggtaccgccggtaccacaacttttgtctggtcacgatgcggaagctcgtcgtaaccgcaagtaattgagctagaatagcatgtcgattgttttaaaatattcgtaaggctctttaattaaaaaataaaatgcaatcattaaaaaaattacaaagtaaacaaaaaatgtaagttctttgtacattataaaagctgcaattgttattcctgtatttgtaaaaaataaacctgctataaatttattcagtgagttattattttcattcatcgacaataatgtgttttgcctaaaggtgtattgcatgaattctaaatgtgtgtacagcgagctgctggccaatgtttggccaaccaaagtagcttcgtcaaaatcctcaatcaagttgctgtcgtcaaaatacaacatttgaccgtccgaatttacttctaatgctgccacgtaatctaataaatgaaacaatgattgaaatgtggcttcatcatctgtttcaacaatgtcagaaaaaaactctggcaaaaattctacaatttctctagaactattactgtccaacgtttcaaaataggctgtgagaaacgtacgcgataaatcgtcaggaaattcacgcggaaacatgttgttgtagccgaaaggatcccacaacgctaaaactaaatccgccaaagtaaataaaatgagcacaattcctaccacagaactggcctttatagctatgcgcgtcaacgctttcgctgccgtagttaatgttttaatagcaattctgtttattgaatgcacaatggccgctttgtacgtttcgcccaacaaacgcacggtgacgcgttgcgttgtagttacaagcatacgtttgagagccggaatgactgctgtattaattttttttaacattgttttgaatgcggtaagtagcatgtcgaaaccaatgtctggggcaatgccaaacaccaatgagtactcttctaaaaacgaagcaattattgcttctaactcttcatctgtaacagattcatttaacacgcgatttttgattactgttcgtggcgccgtgcgcgcgttgtacgttatgggcgttttggtaaaacctgtttcagccgtgtacgacaactgcatcaacacgccgttctcaaccatgcctaaatcttgcaaagtgggtgtttgattaaaaagtttttcaaattctaaatctacggctggatcgcgcacgctacgccattgcgctaacacggcgttggagtctgcgacaggtcgcggcgggaggatcggtgaaggcgctgtataatcgtaatcgcgtagttcggaaaaaatgttattggccatcattttaaacgtgacatacaacgtgtcgcccaacacaaaaccaatcattgtttcccaccatcgaaacgagcaaccgccgttaaccaagtctcgtccaaagcgacgacaatacgcctcattaaactcgcctttaaaacgttcgggaaacaatggatcgggatcgggttgcacgttaaatgcgggcacatcgtctactcccataatggtatgctcttcggtgcgcaaatatgggctgttaaaatacattttggatgtggaatcaaccattatgcattggttggcgggcgtgtacgtgaattcggccgattgcacttcgttttcggcaccttcacgcatcgcagctgcgcgatcgagatgatagcatgctggttgcgcgtatgccacgcttgtttcagaagtttgcgtgtacataaacggcgtttgatttgatacaacgcccgtttcgtgaaacggaaaacagctcatgctgtcacagccgcgtcggctaaacgccaacttgattgctagagcgcggtcgcgcaaaagcggtggcacgtaataatcatcttcgctggacgcgggtcgcaacgtgtaatcgatcaagatatgtggtagccttgtgcgccagcgttcaataaattctaaccggtgcatgtgtgatgcgtaacgacttgcgttggtaagatctacggccgttaaaactgccatgtttgcttactacacacaactatttgacttaaatcatttttgcaaattgctcgagtgactccatttttaaacttgctttacaaatataatgctacttgaaaagcgaggccaatgctcggtgactcatgtgcttcgcgaactagctttacaaatataatgctatttgaaaagcgaggtcgatgctcggtgactcatgtgctctgaacttgctttacaaatataatgctactcgaaaagcgaggccaatgctcggtgactcatgtgctttgcgaactagctttacaaattcacatgtatttgtaaagcgaggccaatgctcggtgactcatgtgcttcgcgaactagctttacaaattcacatgatttgtaaagcgaggccaatgcttggtgactcatgtcattttgaacttgttttacaaatataatgctacttaaaaagcgaggccaatgcttggtgactcatgtgctttgaacttgttttacaaatataatgctactcgaaaagcgaggccaatgcaaagcgaagtcaatgtttagatgttacgaaataaaatagtcaactaactgattaatatatttattttaaaaaccattttgtacaatatttagaaacataattttattatacaatatacaatataaaaccaacaccactttgttaatacaattattaaaaccaacaccattatacaattttgcccgacattgtgtttactctaaataatcatcgcaacgtttcttgcaaatgctcttgtgcatttttaaatcgtaatacctgatgagttcgccgtgcgaagcgttagtttgtacagcttcgtggtgaaagtacaaattgtcatatttgcctttgaacttgtagcgatccgtaaagccacacttgctgcagttaaggaccgggttgttgtagaacgttttggccgatttgcacgcagtgcaatgcccagatttgattgggcgcagcggaaacgtaataacgcccgtcacaaattcttgaatctcgtacccatacatttcggcaaacaaagttccgtggattgaatcaaaactgttgtcatcgattgcgctcaaaacgctgctagggtcgctcactgtgaaacaatcaacatcgtctgctgttgtgggggtttggaacacattacggtaccggctaattctaacgttgtaatttacctcttttagcaccaagttgccggttgttttcaaagagatgtacataatgtgctcgttgggacgtttgaagtcttgcaacagctgttgcacagttttgaaggggccttcgtgcttgacaatttctatgtcggtacggtgaaattcttcagtttcaaactcaaacggaaatatgtactggtaaaagaagccagctttatacaatatcttgatgtgcatagagttaatgttaggataaatttcgtgggaattaagcggatcggcaatttcgtatgcgcaatcgcaacacgcgaaatcaaaactgccgggaacattgggcatagccgaaggctcttcataagcttcatcgccctcagaaggcggacgttgtgactgacgcactatcacatacaaaaaccacgggcgcgtgttttctttgaatttgtaccggcaaactgtgcattcggacaattgcacatgttccaaattatctttagtcttgagtcgcgacccttgagttagcatttctttgctgtttatgtaacccgacacatagtttgtagcaaaacgcaaggtggccttcatggcttcacgttcattttcgctcagaaaatgcggacgcaaatcgaagattttgtccgatttaagattgtcattaatcgccggctcgttatcaaacttaaaaccgaactcaggcgatacatgaccggcggcgcgtatgtttaaattgttgtggccgcgcttaatttgcttcgcaattgcagcgtgaatttgctcagctttatttaccgtggtggcagctgggcgtcgtgcgttggatgttgtgccggaagtgctcgcaacggatttttggcgagacataaccgattgagggctgccgctgcgctgcttgccgtcgaaaatattattttccctgaaccaattcatgttgctctaacacgatactgaacttgtttgctattgctcgcgcttataaacctaaattgtatctattgttatctaataacatacgtgattgtgtcattatcatagataataacaagcctaattgataaaaggcttaattttttaattaatctaattttgataaaactcattacaattatctatagataaaaatatttgtacctaaattatttacaattttatgtagctaataaaatataacctactttatttttaactgataaaaatttattgttcaagttatctgaagctgataaaaattatcgttcaagtaaagctgataaaatgccagctatataatttatctctagttgataaggtaatcttatttgccgcacggtttaaatgacctcgtttacaagataagtttgttttggcgtaacgcaacatgataaaaagtggctattggcaaaacgttttagaaaattgtggccgcagtgatttaactgaagctaacaaaatggattttaattttgtgttcgctcacatgtactgtgctgatattttagtggattctaaagtgcatcgcgatgtgcggggtgcagcgtttgttttacttgatgacaaacattttgaattgtacaaacgccgcatagaaaacaatttttttcgttattacgatccgtgcgacgacatggcgtttcctaaacatttacttaacaacgacgtatgttgtcatcatttcataaacgatgccgtatgtgtggttgaatgtgtaaaaagcgtggaaaaggcaagcgttggagtcgacattattgtattattgccatatttaaaacaattgcaattaattttgaaaatgttaaacgacgcgtttgtttgttgtgaaaaaagtcttggcaggttacaaatgtacgtaaacgaactgctgtcgcattgcttgttgtgcgcggaaaaaattgaagcagcttcccgcacgttgcaagttatgagcctgtttgttaacacgggcacactatacgaatgtaatttgtgtaaagaaatctctacggacaaacgatttttaaaacctaaagaatgttgtcaatactctatttgtaacgcatgttgcgtgacattatggaaaacggcaagcactcacgctaaatgcccggcgtgcaacacgtcgtttaaatcataataagtgtgtacgatgagcgccgacaatctgattacgctggctcaagatcagttcaaatacctgtttttgggcagctattttgatttgaaagatttaaactatgtgccagcggaagctaaagcgtttattaccaattacgtagattgtaattttcgtgtactcgacgatgttacgctgcaaaactatattaattacctaaaaagcattcaattgcgccacatggtgtcaggactactcacacctgacgtgtacaagtttataaaaccgcagtttagttttgtgtgcaatcgttccgccgtagacattcttgaatttgattcgcgtatgtttatcaagtctggcacgcccgtatacgcgaccaatttttttacttctaatcctcgcaaaatgacttcgtttatttacagcgagtttgttaaagtgtacaaaaatcggctatttgccaacacaaacagtcacggttgcgtattggcaggcgccgcaggtttcttgtttgaagacgcgtacgttgactggagcggtgtgcgtatgtgcgccgcgcctaggttggacaataatcgccacccgcatcgcttgtacctgttgggtgacgaaatggctgcgcattttgttaacaacaatattttaccgccacatcccaacaacgcatccagattaaataattcaatgtttatgctcaaaaatttttacaaaggactgcctttatacaggttgcaatatcaggtggttaacagcatgaaatttactacgcgcaaacctaacatagtatttgacgaaataaacaaagaattgaatggtaattcgccgtttgttaaattaattcaacgcgattacatttacgatgcccaatttcctaccgatttgctagaggtgttaaacgagtacatgaccaaaagttccattatgaagtttatcaccaagtttgcaattgaggatcacgcgtccaataacgacacgttgcgcgaaattgtgtttgaccgctattcggtggattgctatcgcaaattgttcattaaaatggaactaacaaacgtttttcccgccatgtacgacaacgagtcggcgtatctgtttattagtaaagaattgttgcaattgtccggcacggtaaacgctttttacgcgcccaaattgcgaattttaagcattttgtctgtaaaccggttgtttggagccacggaaacattggattatcaccccaacttgttaatgtacagacaaagttcgccgccggtgcgattggcgggcgacgtatatgttgttgataagaacaaaaaaatatttttggttaaacacacgttttcaaacacggtgcctgcatatcttttaataagaggtgattacgaaagtgtgtctgagctaaaatctttgcgcgacctcaatccttgggtgcaaaacacgcttcttcaactgcttatcgttgacggacccatcgccgccgcagaaaacaggccaaattacaggcgattaacatgatttacaccgaccccgccactggcgcaaccacgagcaccgacgcgtccggcaacagctacctgaacaagttgacacccaacacgtttctaatcattttagctgtagtagtgatagtagctttactaattatttttattcaatctagcagcaacggtaacaacagcagttcgggcggcgccaacccgcaaatgggatttgttaatccgctcaacgcgacgatgcgcgccaacccgttcgtagctacccctcaacgcttgtaaaataagagcaaaacatgaagcgaattaaatgcaacaaagtacgcactgtcactgaaatagtgaatagcgatgccaaacttccaaaaacgtacgatttggcggagtttgatttaaaaaatttgtctagtcttgaaagttttgaaacgaccaaaatcaagttagtactcagcaagtatatggccatgttgaatacgttggaaatgacccaatctttgctagaagtttttcgcaacaaatcggacacgcgtcaaattgtagccgtgatactggccacgatggggtttgtgcataatcgtttcaacccactagttacacattttaacaataaaatggaatttgtaatgacggaaacggccgaaaccagcattcccggcgaacctattctgtttacagaaaacgatggcgtgttgctgtgcgccgtcgataggccgtcaatagtcaaaatgttaagccgcgaatttgacgtggacgcaagtgtggattgcaaagtacccgattacgggttgcgcattgctaaaacgctggctgtgtccaataagcgcacaaggcgcagaagcgacagtgacgattatgagtttattcaacgatccaaaacatttgacgagtacaacaggcgggttgacgcggtgctctccgattttaccataactgaaactgaagctacacaatatttaactttgctactaattgttgaacatgcgtatttgcattattttatttttaaaaattatggggttgtagagtattctaaatcgctgttggaccattcgctgtttgttaacaaactacgttcgtcgatgagcaccaaagcatttaatttactgttaagcaaattccgattcactatcgaggactttgataaaattaacaacggcaacggcagtcgatttactgtgtataattttaataaataaacgtaatgctactgttagttttgtttttaattctcctaaaagtgctaatttttaaacggctcaaccaaatgcatgttgattcacaccatagcaaaatatgcccgtcaggctatttcggtctcaattcggacccgtttgattgcaacgcgtactatatgtgccctcacagattgcgcatgtattgcgaccccaatcatgaatttgatttagattcagctagctgcgtacccatcgtttacaacccttgcggccaaggttgcacagcgcgtttgtaccgcaatttgctattgtaataaaacacacattatacaactttatattttttattaaacctttttgtcaaactgtacggcgctatcgttaattggtaaatcgacacaaaacaatttaatcatattaacatccctgttgttggcgcggcatcgttgtaagctgttaacaaaggcagcggatacattgccgctcaaattaataatttctttaggataaaattgatcgggtcctgtattgttatgcacgcgcagacccgtgatgtgtcgcgtgcgcttcgcttctgcggacttacgcacgcttaacaaatgccacacttgtatagcgccgcgtgcaatacgaacaatcataaaacccaacggcgcggtgtatttgttgtgaacaaataactcgcgaaataaacatggcgcgcgtacgcagctcaccatataggcgtcttttcgcgcaacgccaatggctacgtgcatgctaatcggccggccattttcgtatccgctcaccaaacgtgttttattgggcgataacgcttcccccactttaaataaataaacgataacgctgttggtggcatgtggcaaataaaatgtgacgtcgttatcttgttcaccatccggttggtataaatagacgttcatgttgtttaaagtttcagttgcaagttggctgcggtgcgcgcaacgtgttgttcaatgatgcctaaacaaatggctgatctacaccgttctttgtacactactccgggaactccgattcgcgcgctgttcaacactgcgactgaattgccggacaacatggacgcggacactatggacaacaactgggatctcgatattacccccgccaactttgaaacgcctagtttggaaaatgaagagttagtcaaccttttagagaacgagtcaaacaacttggcacgcgatgttatgtcgcaatacttgatatttaataataataatactcaaaacgccatgatggaaccggaggtgacgttgtcggagccgagcactagcgggacaaaacgtaaaggcgcacccgattcggacaatgacatggaagatgcttgtaaaggtaaaaaaattgtaaacaaaagcaagattcgcccacgttacaagaaagctaccattcaggacaaaactacgttgcaagaggaacaacgctacacgacagaaatttgcaccgtagcgcccgccaatgagattgcgcattatttttcacaagacttttctacatacttgaacagcgttgattgccaagtgacggctaatcggttttcggatcacatttccgaaactggttactatgtgtttgttgtaaaaaagtctgaagtgagggcatttgaagttgtatttgctaaatttgtgactaatgttacaaacgaatatcaaaacaattatcacacagtggacaatcgcgtgtttgtagtttcgctcaacaacgtcaagtttatggtgtcatacaatttagtgcgcgacgaaggaattgacattccgccctacgtgaacctttgcaacgacgagcaagcggcccgtacgccttttgattgttactttgagccggtcaaaggtatgttccagactacgttgataaatcattttcatttagacatgtactattcacaaacaacatttgtgactttgatgcaagcaatgggcgaaaacaaaacgggcctactgtttaacagactgtttcaaatgtatgaagatcggtctttgtttacgttgcccataatgttgacccgcaaagaaccagttgttgaaaatacgccactgagcagaaactatgcgtcatcgtacgtgtcacaaattttgaaatactctaaaaacatacaataccccaacaacgagcccaaccaaaatatcattgacagattagaagagattgtaacgcaaaagtcatcgctcacgtacaagtacagcagtgtggccaatttgttattcaacaaatataatatgagagataacaatgcagacatgttaaagaaagtgaaaaaagaagacggcaacaggttgctggtggagcagtacatgtctttaaacgaaaacgacctaaacagtcacaactttattgttttatcgtttggcaacaacgacgaaaggctgactattgccaaaaaaaacatggaattttattggattgcaggcgagctaaaagacatccacgttgaaaatctcatcaaaaaatacactaaaaatgttcatcacgtgtttagaattatcaaagttaacaggcgcgaaagcactacttggcacaacaatttgctcaaaatgttagctttacttttacaaaatttaattacaatagacgccgccaagcagtactctgaaaaacatgacagtaaatttagctataagatgttataaaacaatatatattttttaccaaataatttttttttatttatgctcgtgtagtaggtgtttgcatgactataactggtggtggttgtggcattgcaactgcactaccgctagacccacttttaaatatgtatctatatattaaaaatataattagtcccaaaaataaaacagcgcctatgagccaaattaaaggcataagcttgttgctcacgctgtcgctagaattggaagatttgccaataagaccgtcgtcgccgagtagatggtctaaacctaaatcgccaatcaaatctcctaaattgtagggttcaatgcacattaacgtttgtcccggtaacaagtcactaatgtctacaaattgatgcgagtcgggatcggcagcggggtcgctttcacgacaaactgtctgttcaatttcgtagttaaacccagcgcagatgctttgcagctgtgcagaattgctaatgagaggatcgttggcgcaaacggccacgtctgcttgattcatgttagggtcgcgttggcaagtgcggtgtaacaaaagacaagtatccgcgttatcgccaccgctggaaccgcgcacgtaataactgcctcccgtgttattaagcgcgcgtataatgtcttgtacaagtgtagcagcgctaaacgtcaagtatgctccgccggctagcaacacagctacgccagccgttttagctccttgcaaataggtattaagacgcgggttttgctgtaacgcgcgatcgacaccgtcggtggagcgcacgtttgtttcgggaaagttttgtttgactgcgtcgccgcgtgtttttttaacgtgaaaactagcatcggggacattgtcagcgcgtcgcagctgtgttaatgaattaatttgggggtcgctaatgccctggaacacgttgcgtattcgcggcacatcgttactgcgcgtaatgcgattgatatctcctgcgctaacaaactggttgtttgacaaattatatcccggttcgtaacggccgttgcctaagtttcgcgtgctgggcacgttgagcacgttagtaaatccagcgggcgttgttgttaacaatcgcgcgttatcggtcgcaaatgtggccggattgggatacactttgttaacccttcgtaggtttgaaaaaaatgtggtcatgtttgcggcttatcattagcagcacaaaattatataaaaattaaacttgttttacaaatacacttgaattcgaaaagcgagttcaatgctcgaatgagtcatttgctttgaacttgttttacaagtacacttgtatttgaaaagcgaggtcaacgctcaatttgctttaaacttgttttacaaatacgaatgtacatgaaaaatcattggttttaataaagtacactaaagagtaaatcatttgatgttgctttacaaatacatcctaactcaaaaaacgagttgctcgggtgagtcatttgctttaaacttgttttacaaatacgaatgtacatgaaaagcaagttgacgttaggtttaaacgggaataaatataatgggacataaaattaatattcaaataaattatttgctgtgaacttgttttacatatttacttgcactcgaaaaacaaggtcaatgcttgggtgatttatttaaatatttttatttgaaattgatgtttgaatgagtcatttgttctaaacttgcttttcgaatatacttgtactcgaaaagcaagtttaatgtttgaatgtgtcatttgctttacaactacacctaaacttaaaaaacaagtcaatgttagggcgaataatacaatcaaattattttattaatttatttattaattagtattactagtaaaagcggtacatttttccataaaataagaatggctttgcgcaaatttttccatttttaatttggtgtcggcaacttgttcgtccagctgggtttgcagatcgtttgtttgcttacgccaattttcacttgttatacattcttgcttcagttcaaaactttttatttctaaatgttgtttgagcaattggttatcgctcttcaccatattaatctcgtgctgcgcgcgcgttgtggaagcgcgcaattttgccaactcggcttctaatttgagcacttttaattcagcttgaagattttgaatatttatagtgctagcatccatgttattttcgcgtaactggtcccaatgcgttttgatagcttgagtgtcgcgcactgtctcgactgctttaagatgtacgaaacctcggtgattatatacgcgacacacaggtgttgttctattacaaatgctacatttgtacattgacttatcaaaaataatgttcgtgtagcatttaaaacacactgcgtgattgcattcacttgaagttacaaaacttgaattgcgattttcagtgtccccaaaggtccacgaacatatatggcaaaaaactgccatgtcaacttccactgccggcgcttcttgcggctcatcttcaaactcatccaacacaacaaaatcaggagaatgcacgggtgaataatttatggtgttgtcgttgttgtcggtaatgattaaatcttgagtggacgacctgcggggtgccggcatagggtaaacgggcgctggttcggctggtgaatatccagggctgcggcgctgcaccggcgtcgtgttgtcaggtgacgacgagaagcttaggcgtcgaccgcgaatattgctggtgtgacggcgacggcgcacaggggtattaacgttcatttggcggctcatggtactgcttgctcacggtattgcttgctcacaaggctgtgatcaactgtgttttccagatcatcgcaggctgtatatataggcttgataaggcaaagagtagggcgttacaaattgattaaatgattacgtcacaaacacactcacacgtaaatatgtaattttttgcactacaaaaaaattcaatgtgtagtagtgtattaggagcgtatagaacagtgtagactattcaagttaaatagtctacgattcgtagtttttgtactgtgtatagggtctcagaaaaaaatgaacttttttgcagtgcaaaaaggttcagtattgctttacagtaactaatcatatctatactttatcatctttatattacgtcacatgtattcctatctatcccctccattacctatgtgttgcctatcaaacagtataaatatcagtgtttacaaacttgtaagcacagttggcttcagtagcttcagtgaacagtaactatttgcttgtaaccagtgaatatcaagtgtttataatgtcttcagacaatgttgtgttggcacatttaatgagtttgtttgaaacaacacctgccgaacagatttctacccaatcagcagcgtccgaactatcatctgatacatcggacactgagtcacaagaaattttacccagatataggcgaggcgcagacgcacgtcaagcgagaaatggaagacgagcgagaaatggaaggttagttacatctatttttgatatcgtgtatattaatgtaatgtagccgcttcggtataaatatttgcaatcacgatctcgaaagcacagtttgtttatagccagcctgtttaccaaacattatctttcagatacaatccgtaccaacgccgcacgcagcaagaaatgctggctgctttcaacgagctgccagtggcgccgttggcggccacttgcgctgtgtgcatggaaacgtacacaatgcaaactgataattttaccgagtttatgatgcccaccaactgcacacatctgttttgctacaaatgtgtcataaacatgtacgcttcagcgatgaatataccgcgcgcctccatcgactgtcccgtttgtaaaaccaccgtgaccacgtggcagtcattttttccaaacaccgtggtgagttgcaaatttaccaaacggacgacgtaccgcgtacctcccgcgcagcaattcactgacgctttgaagattatgcgcgagcgttacgcagctacggccgatgacatcgagaccgctaaccctgaggtagccgctttaaaggagcaggtaaagaatgcaagaaacgagaataagcatttgcaggaacaagtaaaaagggcacggtccaacattgacattgcaaataacacgtcgcgttatacaatgaatgatttgaaggcgaaattagatcgccaaagagaccaacataattatgagttgaattgcatgcaaagggagttagacagcgttaaaaatgaaaaacgcgaacttgaacaaactgtgcagcgtatccaagctgagatggcggctcaacccccagtagctcaaccctcagtaacatcgggatccgcggtgatggttggcgttgatttcaacgaaaacgctcgccagaacacaaacccgcacgagcgtttccgctcgcttgtgtactccaccgtgtccgaattgttgcttgaaagtcgcattcagagtcttcaaaattatgtatttggctcgtcttgtgtcccctgcgaggtgaacatcgaagtgaacatgccttttgatgggtaattgagttttattgtataaagttgtgtattaaatataaacttatgtatcaaaaataaataacggttaaaggtttatataataatcaataaattgtatacaaaatataaaacaatttataataaatgttttaaaggtgtaaggtttaataaattttttaaggtggagggtttgcttttaaaggtttttgattgtatataataagtatgagtgttgataataaacaggttgttttaactgaccacaaagagttttttattgtacaccctttatccgataatgaatcacaacaaattcccgatgatgatcttgaaaaatgtttgagtgtgaagcctcatataaaatttgtactcaacttcccgaccattgaaattaatgacgcacccgaaacgacccaaactgcttgtacagtacaaatataaacaggtaaatttaacaatttttatttattaaaaaacgatgttttataatatgattaaaagaagtaaatctaaaatctatattaaatctagttaaacaaaatacaaaatcgcgcgcgtccatattgcgtacatccttcaacatgttaatgtcattgtattgttggcgtcttttcatactagacaaattaagttcttcatcaacactttcttcaaatggatgtttgccgccagtcagcaacttgtacgtcaacacacccacagcgtaccagtcaaaagagcgcgcgtaattttgccgccgaattttttccggactaaaatactccaacgtgccatcgtgcacgccaggcaaatgttcgcgtttgcacaaaccgtaatcgcacaaataaacgcggtcccgcgctttaaagtataagacgttctccagcttgatatcgttgtgtatgtaaccggtcgcgttgtgtagatcattaagcgcgttgcacatttgacgtactaaatttgccactaacacgctactaagtgcgccatccatttgtattgtttcaaacaaatcaaggcattgtacgtaatccatcacaataacgtgcgcgtttaaagagctgtaactaaaatacatgttaataaaattggggtgatcttgcatcaaatcgtgcacgttaacttcatcggcgctaaaattgtgcgcctctatagttttgcgcaagtaacgcttgcttgtcggtcgatggtacaacacgtcgattttgccaaatcgtccattgattaactttggcgcgacgacggtgcactcgtcggtaaacttgactagcgattttaaagttgcgtccattattatggaccgtcaatatcaatcggtaaagtcttatttaattaaaaatgcaaacaacgcgttcgacgccaatgcttttttaacactaattgctggacccgaagcgcataacgtgaaacaaaacttgatcggtggcacggtgcgattaaacagaacggcggttttggacttgctcaaattagctgaaaatatttacaatgacacagcgtatatgcatgttgatactgtagataatttgcgacattacacaacgcttatgcgcatgcgccaaatgttgataagcgttacagatcaacacgttagacttacgttagctaacattgtgagtcgcgttgagcatttgttgcgttatgaaattgtaaacgacgtggaaataacaactttgagtggcgatttttacgaagaatattcaaaatatgctgctagacagtacgcattatcgatacaaatgcctccgccaccgcctgtaataacaccgctgccgccaccgccattgacgccgcatcaggtgcctccgcctccgccaccgccattgacgccgcttcaagggttgctaccagtacgtgatgttgaagccacaccgtcgccgccaagtacgttgtcgaaatctacaactttagacgaatttgaatattttagtaatgctagtatgatacaattgcctgtaacgccgatcaaacctttaatacctgtaaaaccggaacatttgaaatttaaaccaaaaactataatttcagaattgccggacatgcctgcaacaaacaatttggatgatcaaaagttaccagcaccacccccgccaccgccaataccaccatcaccacctttgttaccaagcaacgatttaccaccaccaccgcccccacctttgttaccaagcggtaacgttccgccacctccaccaattgaaggcatgcttgatgatatgctaataaacgcgataattgcaggaaataacaaaagtgaaaaagttaatacggatgcgcgtggtgatatgttaaatttgataaaaaaaggcgttacattaaaaccaagcaaaacaaacaaaagtgacaaaaaagttgacgatcgtgccgatttattg

SEQ ID NO: 9 - DNA, 126629 bp, Antheraea pernyi nucleopolyhedrovirus
ctagtacgcggggccagtaaacagtggcgcgtcgggcgcaaactccttgaccttgaacacaagcgaaacctcgatgagaatttcctcctcctcacccgagtccgtgccgatgtacacaatgggcttgtaaaagttctcccagattacgcggtttacaaacgattcaaacgagttggtgtactcgctgtgaatgttcatgatggggcagccgccgcctttcttggcgaggctaattctgtactcgttgttcatgcccacgtaggatggctccacaatgcggattacctcgtgcggcacgtagtcgcagtcccatctgagcgcgtgctgcgccaggaacttgtagcacctgttggggcgcgtggggcgcaggttaatgacgaggaacacatccatgacctcttggtcgtttacaatcggaaagctatcctcaacaaaacgggtccaagtttcgcgcagaaattctttaccgctccagttgacaataagtttcattgtgtcgggtttaacgttgcggatttccttgaaaagtgtcagtttttggtttttacccggccccaggaaagggtcttccgcgaccatgtaattgtctaaaggatcccaatgcttttcttcctcttcatgttcgactaaatgcttcttgcgcttggcgttcttaatgacggaccctaagtttttgtaatacttgttgtcgtacacataggtgcgaccaatggtcggccggtatgagtaatctggcatagttataggaaattttactacaaagttgctacaataacagcaatgtacttattatctatttaaaggtaaataaaacatgtaaatcaaaaacgttttttatttcattttttaatttttagcaaacggtcctgccgcagttgcagtttgtagatgcggtccacaatctctttttcgttggcgatgtcgtcgcgctgctgctggctaagcgttaaccagcgcccgtcgtcttcgcaaattggaacgcacgccgccgaggccgccagccggtcggcctccatctccacacgtttaaccgccgcaagctctgcgcgtgcagcgccgcgccgcttggccgcaacggcctcgatttgtttgttaagatgctcgcccacaaagcgctccaagtcgtacaggcattccaggtcggccgcgtcgtccaggcgcgcgcccgtctcgctgctccagcgaaagaaccgttccaaaattctctgcgcgctaggcacggccattttgcacaaatgcgctgggcttactaattgttacaaatggggtttttacctttgcacgtgcccgccaccgggcacaacttggcgcctttcatcttgtcgcaattggacggtttgtacacgttctccgccttaatgagcaaatgcgtcacctcacccacgcatttggggtccatgcgataaaagtgtaacagcgcgccgattaaacacgcgcttttgcatttggtgcacgtgaccacgttgcccaagtaacagttgaacgcgaagcgtttgcagtacatgccgccgcgcggcgacaccgcgccgctgagctccgccatgatcttggccatgcacaacggcatgttgatgcgcgccgccagcaccttgggcaggctttgcgagccgtcggcgcacgcctttaaacacacgttgcgccggctacgtacaggaagcggccgcttggccgcgacgggcttgggtgcgcttaacagcgacagcaagcgcaagcctgacatgcgcacgagcagccccggctcgaacacggtggtgggcgacagcgtcagcacacccacaaagtcggcggggtcgatcaagtacgactcgttcttgcgcaggctggccgcgcccgcggccggattccacgcgcgctccatgtcacacgcggtcgcagagaacactggactgcggcgctgcggccgttttaatgaccaccgggggcgttttgtcggcgccatccagaaaccggttacagtcgaacccggtcgccgaccgcgtgcacaactcatgcacgctgcggcgcaggctatttagttcgcgtcgcagctgttctcggtcgtagtcggcggtgatcacgggcgcgctcctcatcgggcggttcattatatattagcgaataaagttgcattaaacaaaagtaacttaatatggccggcgcgcgctttgttcggtttagcctgcggctcacgcagggctacaaggaggatatcgtggcacacgtgcaccatttggcgcggctgcgcgcgctaatcgacggcaaagtgacgcatgcggacgtgcgccgctttgggttcgccgaccgcaacgcgctggtaagcgcgtgcatgacggtcaacgtgcaggcacacgtgcccgacggcatggtcgcgctgccgcccaaatgcatttattaccgcgtgtgccaaaactgccacgcagtggcggatgtgcccgcgttcgacgaccactcggtggcgcgctatttgtgcgccgcgtgcggcatggtgctggtcattgaccaccccctggacgtgtttggcgacacggaggaaggcgtcaacgagctgctggaagtgcaacgcattaacgcgggcggcggcgtcgcgccgcaattataaattgttgcacagcgcgggcgcccgcattgacagttatgcccgcgacgccgccttcgctgcgagacctgcttttgtggcagataaagcgcagcggcgccgacaaaaaaacaattttaatttgtaatattatttattctgtacattgatgtttgttgcacatatataaaataaaattatttttaaacaacttgcagttttaatttgttatccacaaatctgtaaatgcagcggctagccaaaaaacgcacaaaatgggcgttgattgcgacgcggcgcttggcgttgacaagattcagcgcctcttcgtacgacaactgttggctgcgcatgatgtagtacaccgccagcgccgccgaccgtgacacgcccgcgtggcagtgcactagcacgcgcttgccctcgccgatgcgccgcaccatgtactcaaaaagcgccggcatggcgttggacagggccacgcatgtcggcgcgtcctcgcaataaacgtggatgtggtcgcccatgggcagcccgagcgcctgtcgaatggggcccacgtccgagttgatcagcgagattacgctgccgatgccgtgcgcctcaataaaccgcaacatggcctcgttgtcgccgtagtacccgcctacgaacacgcgctcgtcaatttggtcggcgtcgtacataaccgcgcaaattaacgctgctttaaacaaaaaacacgccctattttcacgtaacaacacactaaatgattaaataaaatagcgtgtaataaattttgctaataattgttaattattaagatcaatttaaaaattgtatttatttcactatgcacgttaaaactgtactgttggccattgtgctgtttgtcgcgctaaacgcgcaacacgttatagccgcgtgcgctgaaaccggcgccgtttgcatccacaacgacgaatgttgtagcggcgcgtgttcccccgtgtttaactactgcttgccggaatagggcctccaacgcgcgccagcaagtcgtccacgtagttggtcctttcaatggcgtgtccgcgcgcggctgcaaactgggcaactgcatcggccggcggcactcccagccggtccactaaatagcggcacactaagtagccgctgcggttgacaccgtgtgtgcagtgcacgcccaccaacatgcccgggcacagcgcgcgcagttcctccacggccgcgcaaaactcgcgcaccacggactcgtccggtagcgcgcggcccggcacgcgcaatttgcggtacagcacgcctgcgcgccgaagctccgcaccgtcgtagtagcgcgtcgtgttggttaaatcgatcacggcgccgagtgtgggcagagccagcaggctggccacggtccagcggtcctcggcattggtcacgtattcaaacgcctcttcacgcaatggcaccttgaagctgataagatcggtgcccgcaatgacgctcccgcacgccgtgtactcgtgccagcggtccggaaacatgtcttagtaaatgtgcccgataacagccccattaacaatgtttggcgcgatagcaatcccgtatataaaggcggcgcgcaacgttgaaatcacatttcgccgagccctgttagcagcaacatgtctttgtcttgcaaactccttgtgtacgcctattacggcgcgtacagcctgccgcacaagcgctacggtgagtcgtaccacctgtaccgcattgtgcaggagcacctttcagattcgtacgtaggcggcgcgtcatgcgtgcgccgcgacattgaaacggcgcgccgcctcagcaacggcgcgctaggttttgaggtggcgcgccagctgctcgacctgcgcgacaccgacacgctgctgtccacgtggtactggaccggccacgtgtcttctggcgtgtgcggcgatgtgcagtgtgtgctggccgaaatagagcagcacgcaccgttagaaaagcgcgtgaccatgtacggcaaaataagcggtgctgtggcgcgcccaaacattgccacgctagatttgttcactgagattccgctcgagttaaccgacaaactgcaggtagtcatcggccgctttttacactttgcgcgctgcaacgagctggcgcgcgtggcgcacgtgttcgaccccacactgcgggtggccggctggtggtaccacaaattttgcgtgcttacgtacatgcaccgcatcacctgcggcgccgttcccgagttggcgccacgtttgcgcgccgcagtggccaagtttatcaaacctaaagacgacgagggcaattgtgcgctcgcgatggctgaagtgtacggccgcttctgcggtattgcgcgcgagcactttgcacaccacaaatcgctagccacgtacgtcctgttccagtgtatgcgcaataaaattacgccgtcggacgaacggtttcagagttttagcgtgattaaaagtttcgcgcggcattgcaaagagacatacgaagatttacaaacacaggccgatacgctttacatttacgccaacactgaccgacaaaagaacgcgttttttgacctgctgtgctgcgtcaacgcctcggaaattgacgctgactgttacgactacgttgtgaataatttttatagccataaaatatagcgtttaattactgtgtgttgtaaataaattaatttaaatataaaaattaaaatgttttatttgctaaagtcctgtttagtgctcaaataatgttgttgcgaagcacgttatcgtcaggctgcttggcgctaaacaactgccggggctcggcgcgctgcagcacgggcaggttgggggccacttcgtactgcgtgcctttaagcgtcatcggaaactcgagcggcaagcaccggtacgcgtagtacacgggcggcgcgtcttgttcggtgcgcacctctttcatgacaatgtcgccgtccaaaacgcgttgccgcccgcgcgtttgaccggaatgctgctcatccatttccatagcgtaggggttcatagtgaaacgcaattttaacttatataattttattacaatatggcctttttgacaatgtccttggcagcggccacggagcatttaacctcaacaatgtgtttggacaggcgccgcactttgtgtccgctgccaaacaactcttcctttatacggtttacggccatgacggggctgggatgcacgccttcaaacatgacgtccatcgattcctcaaattgcagcttgcgcttgcgaaaatgctcctgctggccgcgcgcaaacgcaatctgcgtgctgccgcgttcctccacaccgctcatgaacacggccaaatgctcgtgctttgtgacgtcgcgcgggaacacaacaccgggcgcggcatcgcgctccgacggcgcctgcagcttgacgtccagcttctgaagccgttgctctaggtgttcaaagcgcgcgtttaccgcgagcttaaacgatttgtgggagtttataaacttgtcactgttggcgctaagcgtcttgacgtgttttagcaccgactcgattttttcgcgcatgtcgtcgcgctcccggtccgcacgaatggccagcagcacctgctccttgttggtgaacggcaattgttgcaaaaattggacgaggccgtgtttggtggcaaacaggctgcccgcggactcgaccgtaaacgcggttggaggcgcgcccagcgcgatttcgttcaggtggcgcgcgcaatcccagcggcagcgcggcagcaggtcatggctgatttgtaaacctttgcaaaagtcaacgaggttaaagtggcgaccggcgtcgtccgccacgtaccggaactcgaaagtaaacgggtggcagcggaacacgtcccagcgcaccagatccgaatgcgcgcgccggtccactgcataccgcttgtacgcgcgcgcgtcaaaagctacagcgccgttggcccaccagccgcgcacccagtcgaacattctgcaatgcgtttaaacagttgctgggttaagcagcgcgagtactggttacccttatagttataactgaacggcgcgcgaatttgtttagtggggttgcaaaacacgtctcggtccacgtcgggccagtagcgcactaccatgctgcactcgtcatccgcgacgtccgcgtacatgcccagcgcctgccgcacgctgtacgcaaaattgccaggtcgaatgtccgccggaaccagcttgctgggccgcttgaacacgccaaaccaaaactcgcgctcggctttgcttgcgtccacgcggaaccggccgcaaaaccggagccacagatgaaacccgcggttgccgctaaacaatacgcgttgcacggcgtcctctttgtcggcgaaaaaatgaagaaacgcggaagcgcccacgttgattcgcagctcgagctcggtctggtcggcgcagtttttgaaatcggcgtccaccacccactcgcggcctccctcgtccaacggtttgacgtgcacgtcgctcaccgcgttggcaacgataaagtccagcagttgcgccgcgctatcaaagtgccgatttgggtgcatccagcgctgcttgttggtcaaaaacgcaaatttgcgccggtcgttaaacgcaatcgcgttccacataaggtcgatgcgctcaagcgtgtacttgcacgacgccatgcgaattagctataaaaaagcggtcacggctaacagattcacactcttctgaagctcgccttcaactgctacacttgtagaaatcaactgctacatttgtaaaataaacaatgtcttttatcgctctactgctgctcgcagcgaccgcgcgcgccgcagacgtcttggcagtgctgccaacgccggcctacagccaccacctcgtgtaccgcgcgtacgtccgcgcgctggcggacgagtgccacagcgtgactgtaattaaaccgcgactgcttgattacgcagccgaggatagctgcggccgcgtgaagcaaatcgacgccgacctgtccgcgcatcatctggcgtagcggcgtcggcggcgcgaatcattggtattacgtcaataaaatgtaattaaacacaatcgctgtttttttccgccgtgcgactgcgcacttctagcctttataaacgctcaccttcaagccaggtcattattgtggtacaagatttcacaggctcaacacgcctagctacatggaaatgttgccgcccgcgtacttaaaacgtgcagcatccgccggcgcggtgcgcgccacttttgtaaaaactgttgtcaccaccacgacggtcgaaaaccgcagcgaagagcaagatttaatagcgcaagtaattgcgcagctgcaaaagacgcgcatatgcttcaataaattgtctcgcctgcaaagaaagcgcgtgcgcaatatgcaaaagctgttacgtaaaaagaacacgatcattgccaatttgacggcgcagctaaataatcaacagcgggtcaagcatttcgccgcggtgctgtgcaaaaacgtcgtgtgcacggtaagcggttctgagaaatttgtggacaggcgcgtcgcggatctgtgcgcggccggcggggagcgggtgttttgcggccgtcggacggactgtgcgcgcgaccgtcagcgtcttgcagaagcgcttgcggcctctttaagggcgggcgtggtggcgcgcgccagcaataagcggttcaaaatcctggaggcggacaaagtggcgagcgcaaagctgatagtgcagcaggtgctttacgatggacttgacggtgacgcttgtgcccattaacttgcggggcgtggaggagccggcgcgcagcgagtgcttcaaattaacgtcggtgagcgacgacgccaaattttgcctaaatgtaaaatgccgatcgccgtttgccaaatttaaagtattaatttcggtcactaattttgctaaccaacatttgcaagccaccgtatgcagccgccacgacagcgtctgcgtagtgaactcgcgcggccagcgggagattgtctttgacgggtttccgaagccagacgacgagggcgcgacattgccgtttgttgtggggcccgtgttttgctgcgccgcggcgcagcgcgtgcgcgccgcggtggacgccatcgagcgtcaaacaacggaggtaaaagtatttattaacgaggctcatgtaaaaagcgcgtggaacgtgctggcgcagctgttttattatagtgataactatgaatctgacctagccaataacgtagaaaaatttattaatgtagacaaaactgatattagtgttaggggtaccaatgccactcaatgggttcctgcaattaactatgtgacgggtagacaactgttaactgtattatttatttttaaatttaattgatgttaataaaacaagtgtttaacaatgtgtattttattacaacgaaaaaataacacccataaactctttccaccgcagttcgcagcccgagcggctgcgcgggtagttaacgtggtcggccacatattgcggcacctggtccacaaaggcgtcggttgtcagaaacgcgtgtaccagcttgcggcagcccaacgccggcccatgcaggtccagcgtttttttgcaaaacgccactatgctttcgtcgcgtcgcttgctcgtcattacgtcgatgtggctgctaacgcacgtgtcctttggcagctgcgtgaacagcgcgcggattaatgccctgcggcgttccaccttaaagtccggccggtccgtgaatatgtccttaagcagacacatgatttgctcggtgagtacgcgctgcagcggcaccactgccacgtggtaatcaatgccgaacatggtgaaactttttacgcagcgctcctcgaacattgggcgcttcatgacgcgcaagtttacaaaaaacacgttaaacgccacggcaggctcgatcataatcatcttctggttaatatattcgtgtacatcgccgtcgggcgaccacaattccgcgcgcagcgcaaagcgcaccaggtcaaactcatcgttgaacgcggtacgcacgacctccacgtgcggtaacaagcgcacgcgcgcggcgccggtgaaacaaaatgcgccgtttttaaaacacttgagtatggtcaggtaactttgcatgcgcacgctctccgccaattggctcaatttatcaaaagttgcgtgcacgcacgcctgcagccggcgctgcatgtttgccagctgcaaccactcgcgggtcgagttgtagtagtcaaaatccaggcacttaagcgtgtcgcgttcgtttttcaagtggcacgcggcggcggccccaccgttcagcacaaacagcccgcttttgtccgctatcacggcctcaaaacactccctgaagaactgcaacccggcgttggcggtgatgcggttccgcaggcagtcttcaatgtcccgcgtggtaatgtaaggcagcatccccgagtagacttggctcgcaacgcggtccataatgcaatttaacgcaagcaacacacgtcctgaccgggcaactgcgcgcgcgcaacaaacgctcggcagccacggcctattttaccagcacgccatcgcgtttgcgaccgcggcgctcacgggtgaccgcctcagctggcctgcgttgctcagcgcgtttgacacgatcgtggcgcttgagcgcagcgtgtttaaccgtagcctggtgctcaacgggctaattaatttttgcatcgcaaacggtgacggtgttaccgtgcagcatcagctacttaaccaaatgttgggagttcttttagacaagtattattaagtttgaatacattatttttatttggcattaaacttattgctatatttataaattaattacatacaaacaatactttaaactatattttaacaaacaataatacttgggattatatttaaataataaacaatacttggctaatacattggtaaacaataattggttaatacaaataatcaatactcggctaatacattggtaaaagctttatgctaagcaaaatgcgctgggagcggcggcggaacgggaatgtggcacggccgcggcttgagcgcgggtcgcggcactttgtacaccggcaggctgttgggtatactatacagcggccggttggagggcacgtcgtactcgctagcgtccagaaagctaaacgtggtcgccccgctatcgggcgagcatgacgacgacgtcgcggattggcgcccctcgctgacaatttctagcagccgcaacttgctttggcgctcttcctcctcgtccgcggtgtcgtacccgtccaccgattgcgcgtcctgtttgggttgaaagcgcatgtctttgtgtcgcacgtacgcgttccagcactgaattacaaatatcatgaaaaccgctacagtaaccgtccactggttttccgtaaacacggtgggttcgttgtggcgcacgtcgatgcggcacgcaacacatttttttgtaaaagtttcaagtaacgcgcccgataagtggtaaaatagacaatttcgttcggcgttaattccgttggcgtcatactcgcccattgacacgccactccagcacaacgactcgcgatcgtagtccctgtacagcgcgtccaacgcgggcacgtgtccatttttgtacatttgaggcctaaacagcaaaaacaacaaccagcaggttaacgccaacgcgtcggctagcaggattgtggccttgacgtaaaaattcagacgcacctccgctttcgtgaaacgcaacatggtcctgtacatgccccaggtggtggcggtaaacacgcacgggcccaacaaaaacgtcgcaagcggcgacaaattgacgaccgaatgcacggcgtcgtccagctccagtaaaaccgcgtacttgccgcccgccatgcccattaacgcaaacacgaacgcgcccgcgcatgccacgtacacagttagatttaacacaaactgtagaaaaaaattgagctgcgacaacatgactactaagtattggcaacatgtatcaaatactgatcgtgcttttcctgtttgcgctgctttatatagtattctggcccttctatcaagcctaccagcacataaaccacgcccagcgctattacaacagcactttgaccgaccgcatggagtacattgaggcggttatgaggcgccggcactacgtgcccatggaagcattgccatcggtgcgtttcgacaccaacctgggcacgctggccggcgaaagcatcaagtgcatgtccatgcccacgtacgtgagcgagatagatctgccactgttcgactgcagcgcggtgtgcgaaaactcggccgccgtgtatttttttgtgggcgagggcgacacgtttgtgatcaatgggcaccggctgccggtgggcggctactgcaccaccaacagcgtgccgcgcgattgcaaccgcgagacgagcgtggtgctcatgagcctcaaccagtggacgtgcatcgcggaagacccacgctactttgccggcaccggcaacatgactcagctggcgggccgccaacattttgaccgcattttgcccggacagagcgaccgcaacgtgctgtttgaccggctgatgggccgcgaggttaacattgcgcgcaatacgtttcgccgcagttgggacgaattgctggaagacggttcgcgccggtttgaaatgcgttgcaacgcgcgcgacataaactctaacctaatgtttttaaacccgctcaacccgctagagtgcttacccaacgtgtgcaccaacgtcagccatgtacactccagcgtgcgccccaattttgagacaggcgagtgcgagtgcggcgacgaggccgtgacacgcgtgcgccacgtagttcccggcgaccgcacgtctgtgtgtgccagcattgtggacggtctggacaccagcacggcgtctcacaggttccgcgtggagtgtttaaacacgtacacgcccgttgaccggttttcgggcaacaagctactatgtcccagcgacacgtttgacagcaacacggacgcagcgtttgcgtttgaggtaccgggctcgtacccgttgtccgggaacgggttggacgagcctacgcaccggctgttcctggacgcgcgctcgcgcgtgcaatttaacgacgtgcgtggcttactgggttaattatctatttgcgcattgttgtctaatcttagccgcattgctatcaattttatcgcactgactcataattaaattgcgctttgtaagcagctatcgcgcctgtggtaggctttgtgcgtcagcgaggggtatataaagcgatcgcgttgacttgcggaatcagttgttaatagccgtttggtgagcatgtttgaattaataatttgcgcggcgctggtgggcgccggtttcgccgaccccctcagttttgaacctatcgacgacgcttcggggctcgtgtttgagcgtttggccgcgctgcggcacgtgtcggacgagcggtttgtgtttattaaaacggtggactttgacccgctgctgcaagagttgtctaagatcatagagttcctgcaagacccccacaacgacgcaacggcgtgcccgctcgtaaaagctgttaaaccgaaaaagccgcgcgctattgcagcgcgcatagcgaaacacctgtcctccctgacgcagctagaccccaattttgtttcctacgagttcgacaacacggatcccaagattaacgaggtgattacggacgtggtgcagtttgattacgtggatagccggcagcaggacgcggactttgacgaggcgcacagccacgctcattggagcgacgtcaacgctgccgacgcgcgggcgctgctgcgcggcgcggccgccaaccgcgccgcgctgctgcccgccgtgaccacggccaacgtgaccgaaaaatatttggactttgtaatgtgcataaacggcaaccgttccagtgacaacgaatgcctgtacctggttgaaatgcacaaaatgatggcccacaagcttgcggacgcggtggtgtttgccgacgcgctggaccgttttgtcaagcagacgcggcgcaacaaactaaacgccaccaacggcctgttcgacgacactgcgttgctacaggagatgcgccagctggtcaaggcgctggcgcgtcaaaacctaagctgggccgtggattttgcgaggccgataaacaagcagtttgacttgtcgcaggcgtaccgattacacttgtacgcgaacaaaaacgaaatggtgctgtgcgtcgcaatgccgctaatgcgcgtgcccacgcccgtgttcagcttgtaccgggtggctaccgtgccgttttgccgaggcaccatgtgcctaatgatggtgccgtcgaccagccacatcgcggtgaccgacacgcgcaactactacgcgccagtgccggccgattttaacacattgtgcaagcagttcactggctacgatgaattcctgtgcccggccagcccgcgcatcgccaccgcggactcgggcgtgtgcgaaattgaaatgtttatggggcgctacgtcgcgaacatcgactcgttgtgcgacgtgcgcgtcgcggacaacggcaagcagctgctgctggacccgctggtgaccgaccgcaagtggctgtattcgtttgcgcgcaacgttagcgtgggctacgtgtgcggtgacaagtggcgagagtgggagacggttgtgccgccgggcgttgggctggtggtggcgcagccgctgcagacgtgttcggcgcgtgtgatcgactacccgttattttttaatgtggattcaaccttttacgccatgccatcgcgctcgtattggccgcgaaagcggttcaactacaacaactacgtggacgccgcgctgctgaaccagacctccaccccgtttgccgatgccgtaaccgacctgagtttggcgcagcttaagacgctgcgctcccggttttacatccgcgactatacggcgtcgcccaagctctttttctcgccgcgccgcgacgtgcaggcgcccgagcctgtgtacgataccaacacgggcgctgtgctcattttcgtgctaataggcggcggcggtgttctgtgcctcattgcggcgtgctgcgccgccaagcggtactgccggcgaaagcgcgccggttcggtggccgtcatgtttcggaacgacgagcgccagcctatcatcactattgcaaacgacatgcgcggcctgcacattgcggtgcccaacaacaacgcgccgcctcagtacaaaaaagccatgctgtttcccatggaaataaagcaattgaacaacaaaattgcgcaataacgcgccaagtataccattgtgtcggcgcacaagttttaaataaacgattttatagataacgtgtttattattttcccagtagtgcgcgcgacacgcaacaagcgcccgcgcagttcgtaagtgcgctggccaaaatgcgcaattctgcaggcttgtttatgatcatggagcccgacaaagccgtgctgctgtgcgcgcggcgcgcgtaccgcggcggcgtctcggcacacgacacgtttctggaaaagctttctattccgcgcgggcaccgtgattgcacggacgcaaaaatttacgagacggccgtgcgcgagtttgtcgaagaaacgggccggttttttcacaaagcgcacatctacaaatttccctttacgctgcactggacagacgaaggcgtcacgtataaatactccatatacgtaggcgtggtgcgcggggctcttgttaacgtgcaattcaaaccaaacacgtacagcgtcaagctgttgcccggcgtggtgggcaacgactaccgcatcgtgttgcgcccgcgccgctacaactgcgagatcgcgcgcagcttggccattgtgccgctaaaccaatattttgaatacatgatcaacaaacagctcactacgtacgcggccagcaactacggcgagttttttgactttgtgcggcaggtcaaacgcctgtttgacgacaaccagctgcacgatttcttttacgcgtcgctgaaacgtgtagagccccatgacgaacagcggtgactgcctgacgcgcagcgagctgcacgcgctgtggggggaggcaataaacactctcaagcgcactttgcagattagaaacgtacacgctcatttgctagaggacgacgccgccgacgtgaaagaatatataagagcgaatttgagccgcttcacagtaatcaccggcaaatgtttcaagcgcaaggtgtgccaccaccacaaacgggtcacaaggacgctgcacctccaaaaaagcttagttcaagagtacgtctcttccgtgacggacgtgtaccgagctgcgaaatggcaaatttgtccgaaacaatgatgagtaacgcgttggtaagcagcgagtccggctgttttaacaagctggagtccaagtacaactcggactatttgaagatgtgcatcaattactttgaaaagcggaagatcccctattttgtggccgcgctgccctgctcgatggacgaccgcaaagcttcaaaacgccctaaaagaatcagtccgcacaacatgtacatcctgtttaacagcttctacaccaagattcgccgacctgaatggctcagcagccccgtgatgtggaaaaccgtcaaggcgcagaaggaactttccgattttgtcaagatgttcgattgcacgcaggaaatgggcaaggatattactagccgctccagctcggtggcggaacctggaaagcgccggcggtccgcggccaccgacgtagccgaggcgcaggaaaactgcgagcaacgcgacaaattgtatcaagagttctacaacgtgctgggagagacttttaaaaacggcgtggcgcccgctgtcagctccctttacaacggcgtgattacgcgcgattcggtaacgagaaacatggagttgttcaagagcgtcgcgcttaagctgccacccgccagctatgtacctacaccgttaagcaaaaaacgtcgcgcgcctgtggccaagagggtgcccgttaagcagcgccgcgaagccaaaccgccgcccgtgtacgctagcgacaacacgcaagatacaaacatgtctgaataattttaataaaacactttatttttatttttattttttcattgctatatacctttattttaaaatgtattattgtttagccgcatttaccctcctcgtagcctcagtaccatatgcagcgtggactccttttgtatgttgtagtcggccatggttttggcgtcctccaattgtttgcccgcataaataagccgctgttggtccacaggcacgccctctttgtcggcaatttgctgcttcacctggcccacagtgtcgccgggctccgtttccacggtgatggtttttccggtcagcgttttgacaaaaatctgcattttgtagccttattaatgacggccgcgttagcatccaacggttttaagcatcagctggcgcggctggtacacgagcgcgcgcagcgcggctacgagcgcgacgtgcgccggctggccgacgaactgaaagcgcgcggcgtacccgcagggcagctgggcgacgcgctcgaaaacatggggcgccaaagtcagcttctggccgatgtggtgcgggacgacgacgagtttcgcgttgtgcagcggcgcgaccttagccaaaacactatcgactatctaaaccgactgcaacacgacaagctgtttcgctgccggctgtgctactcgcacgccgattggctgtggtgcgcgttccacaaaacgcacgcgtaccgcgggccgcgcgacatgaacgtcgacgcgtacgttgaccatttaaacagcgacatgggcgtagtggaacttgtggaagaatattaccattatttgtcgtcgtgcaacgacaaacgcaacgccaagcgtgcccttgtgatgctcaccaattttgaatcgctttccgaccttttagccaattacaattaccccgcggacgacgcagacacggtcacttttgagcttatggactttgattagaatgtggacgccgcattggcccggtttgtctgcacgtacgcaaatcatgaccctgcgcacacttgcggcttatctaatgcattgaccccgttgcgcgataatgaggtttgctgcgcgcggccttggctgcagcgtataaaaggcgcgcgtccgctgcacaaagtcaaaacgcatcatgcatcggtttgttttagccgcgttggccgcggcctccttgtgtcagctaaacgctgccaaagacgagctggaacacatcaccggcaccggacggcttgtgcaactcttcattaaccaccgttatctggccgtccggcccaacggcattgttgaaggcacgtccgacgcgctcagcgcagacaccgtgctgcagcgcgtccgcggcaacaccagagggcacattttgctgcgcaacgccgttacgtgcatgcacgtgtgcttagaccggtgcggcaccatgtacgcgtccgcgaccgtgtccagtgattgttttttaaacgaaatgtttaccgaaactaatcataacgtgttgcacaaagtgtatgaccgcaaggttacgtacgtcgcgctagacaatgttggccgcgcacgccgcgtgcaaatttcgaagcaccgtagtttaagaaacatgagtaaatacacgtttattatgcgcaaaccgttgaactacaccgtaattacccagtgtcccaaacataaaaaagttgttagacatcgccattgccgtttgttgtaatgcattataatctttgtaattttcataaatgtataattttaacgtttattgttgtataatctttgtaattttaataatcaaataaatgtattcaaacatatatttgtttttttttaagtattaagtttaaaatgcatttgaaaactattataattgccaccgttgcgctggccacatgcgtgttggcatgcacagaagacggtagaaattgccagtacagttacgagtgttgcagcggtgcgtgttccgccctgttcaaattttgcttgcaccgctaagccaaatcaacgcgtctttcgggtatagctatacccgaaagacgcgttgaattgtaactagtttttcaaaaacgattgtgcttgaaaaacgtaatctatttttagcaatgcgtcagcgctgattttgcttttcgagtacagccattcttgaaaaacgtgatctatttttagcgatgcgtcagcgctgattgtgcttttcgagtacagccattcttgaaaaacgtaatctatttttagcaatgcgtcagcgctgattttgcttttcgagtacagccattcttgaaaaacgtgatctatttttagcgatgcgtcagcgctgattgtgcttttcgagtacagccattcttgaaaaacgtaatctatttttagcaatgcgtcagcgctgattttgcttttcgagtacagccattcttgaaaaacgtaatctatttttagcgatgcgtcagcgctgattgtgcttttcgagtacagccattcttgaaaaacgtaatctatttttagcaatgcgtcagcgctgattttgcttttcgagtacagccattcttgaaaaacgtaatctatttttagcgatgcgtcagcgctgattgtgcttttcgagtacagccattcttgaaaaacgtaatctatttttagcaatgcgtcagcgctgattttgcttttcgagtacagccattcttgaaaaacgtgtgttatttttgcgtaaacaatcgtttaaacacataagcatgaaagccatttgcatcattagcggcgacgtgtacggcgaagtgcactttgagcagagcgcgcccggagaaaccgtctacatcacgggacacttgcttaatttgccgcgcggcttgcacggttttcatgtgcacgagtttggtgataccagcaacgggtgcacgtcagcaggcgagcattttaaccccacgcatcaacagcatggtgcccccgacgccgcagagcggcacgttggtgacctgggcaacgtgcgctccgccggctgcaccgcgcttacgcctgtagacatgagcgataatgtaattagtttgtacggcccgctgagcattctgggccgcagcttggttgttcacgtcgaccgcgacgacctgggcctcaccgaccacccgctcagcaaaattacgggcaactcgggcggccggttgggttgcgggattattggagtaaaatagcggtgcgtcaccgctaaacccgcttttcaagtatagacgtaaccgaaaaacgcgttcctattacaagaaattgtggtcgtgccaattcacgatatatgcattttgtggcgcgcacacatgccgattgcacgtgcccaaacgaatttatcgggtgatgtggtaggatgattgcgctccgcccttcaccgagcgaccccgagttgcaagcggtgacaattgccacgctggccagtttgcccctgctgacattgttgctgtgcacgccgcagatggtgatttctaactgcgtcgcggccggcgacgcgtgggtcaacggcacaatgcaatccacggctgtcgcgcacgccaccatgcacaccgcctgtgtggcgctcgccgcaagcgcgttcctggcaggcttgtttgtggccgcggcggacaaggtgccgcgaaaccctgccgcgctggccttggcggccgtcgtgttctgcaacaaagtagttctggtcgcggcggtggttaaattttactctcgcgccaccgtggccggtggcgagttggtgcacggccgcctgcatgacgccgtctacggcggttccgcggcgctgtgcgcattgtacgccgcgacggcgctcagcgtgctgcacgtcgtgcgctggatttgttacgcatgggtggcgctggcggagctttgcgagctggtgccgtttgccgccaccgccattgccgcgacgacgctgtacgtaattgcgctcacgttggccggcattgtcattcccgaaaacggcctgctcatgttccgcaacgcgtcaacggctttgtgtaaaactgacggtgtgtggattagcgcacgccttagtatcgcaaacctttgtgcagtgcgaacgtaaatcgcagcaatgtttaccaatccatttgttttacgcaattcggaattaactcgtgtcgagttaacaaataaagtttatcaaccgtttcctttgcaagatcaagcgtcgtgggctgtcaagaaataccgtattaattatggacatctgcccgttatactttgcaatgtgatagcggacgccaaacaccctagttttgatgattttgatagttttttgtgtccattttgtgaagagttaatacttaaacaatattttaaggctaaaaaaacagctgcaaacaacttggcaacggccaattgtggtttgcagcgttttaaatattttacgaacccaacggccagttgtgaactgcaacgtattaaaaatttggaacaaaaaaaacaagccgtggcataagaataagcctttgtacgagcccggtgcctgccagcgcaagttttacaataaacgtaggtaacactttaattaaacaaatgtgtaatataaattataaatttaataataaaaattaacacgagttttgcattttattacacctcacacaattcctcgtaaaagttgtaaattaatctatttaaatcacatttgccaaaacgtttgtattgccgcaataattgcgccacaaactcgccgtccagcacagacacaaagcattgcacgtaaagcaagtcccaatttttgcgggcgatgaccgcgtccagcctgtttttgtgctccatgcgcagcatgcccacaaacttgagtcggctgtggcccgcgttggcacaccccagcccgtttacaaacggcaagttgggcgctaccgtataattgatgtacgtgtgcaccgccgtgtagttcaaatcgtcgggctgcaaggtggccgccacgcggtgcggcacccacacgctgtcgctgtacattttcgcccactttaaacatagcgcctcaaacagccgttgctcgaacaacgcttgcgcaacggcgagcaaaccgtgggtacccgcaaccgtcgagaacgccgcggcttgcagcgacggcacctgcctgtgcggcatataaggcgagcacttgcgcgttttagcgtaaaggtctgtcggccgcgtcatggctccgtcccgtgcgctgcaacgcgccgtcaagcagcgtcagtacgtgcgcgccgcggaactggcgctggagtcgcgcgccaaccgcgagttcctgctcaagcttcacgacgccgatttttggaagcgcgtgtcgcgcgactgctttgggcgcgaccgattcctggacgcgttttgcgacaaaatagactgggacgtggtttctgcgagcccgctgaccgtagccaccgccaaagcttttgcaaaccgactaaactgggagctggtgtcgcgtcagccgtttctgcgacaagagttcatctacgagatgggagagcgcctagacctgcgtgtcatttccgccaactacaacaacctgtcactggcggtgcaacagcggcacgcggccgctttggactggcgtcgcgttgtgctcagccacacgatgatcgacgagtggtttcagagtcccattgcagagcatatcgactttaagttggtggctaaacacaagcggctcaaccgcgcgcattttggcgcgccgcactgcatgtccaagatcgacctgactacgtacatgagcgacccgcgcaaaatcagcgacgctctaattttgcattgtctgcgcgagggccgcgcggagttgcgcgcggccgccgccgccgtcccgtgggcggaccacatgcgcgtatttgacaagtaccccgcgttagcggacacgctgcgcgaatggggcgtgccggcgtggagcgccgccagcgcgccgccggcctactacatgcggccgctacccgccgcgtttgagcgcgactttgtgcgcaccgggtattgggacaagtttgtcagctacgcgaccgtcaccaccagcgacgctagcgcgacgtttgctttgatggtgtttgacaactttaaatcccacgtggactgggaccaactacaagccgccggccgtttcgtaaatttgcccgtgttgtttcgcgcaaacgagcctatcgtgacattgggcgcgagcgacgagcaggtgcgcgccgcgtacggccgcttcgtgggtgccggcgccgacggagaacacattattcccatgcacatgagcgtgcgtgatgcgtacttcaagcggcgacttgtgcagccgtgcgcctcgcaatgcgagcacgacaaagcgcgcgcgtgtgaacgcgttttggacctcaacggtggtgaggcgctgcttaactggaacttgttgtctgccacacagccggtgtgtcccttcaatcagcgacaattgcaaaatgccaacgcgcaaacgtaccatcgcgacaacccgcattttgtgcagcaggtttatgagatgatgatagccgcacagatgaatattaattagccgataattgggataaaagcgatgcgtttacctcatatggccagatttggcaaagatgttctctcataagaacgacgcgcgtcctttaaccaagcagctggaccaaattaacaaaattaaacaaaaaattaccgtcgaaagccagcattttgaaaaaatcaacaagctgactaaaaattccgcggagctgcgggaacttcaaaaacgcgtcatggactcaaggcaaagctttttaaattacggagtgcaacatttttaataaaacacaatgtcacagccaaacgtttattatttttccacactcaaattgcttagccggcctgaagagctgcgcggcgagtcgcgcgcagggctcagctcgccgtcttcccggtcgtagccgtgctcgcgcgcgtacagctccagctcgtcgcgcggcgtggcgctgcggcgcggtggactgccgcgcgccgcgcggcaaaaaaagcgcgcaccgtccggccaaaaatagcggccgctgcatcgctgcaggtgccgagccgcgcaccggtcgcgcacgcgcaaccgacggcgtgagctgcgccgccagtccacggccgcgttgcagggcggcgacgcggcggcacacatgagcgcaattagctcccgcgagaaacgcttaactgtaacgcggtgtccgtttgtactgcaaatccattacactacaaacacttttacaaagtcggttacgtcttgccggcacgtcgggcacttgccgtctaatgcaaaatagcattgcatgcacacacaaaaatggcggcagggcatcagcacggtgtcgcgttggcgttcgagacagactttgcattccatggcttcgctggcagcggccggcgccgcggcgctctcaagcggcgccgcggcgcgttggcgcgccgcggcgcaaaacccttcgcccttaatgcacaccacaaagtagcaatgcgggttggcgagcgcgtgccgctgccacgggtcgtcgcccggcagccaaccgcgcacgcgacagtcacaaaaaaagcaggccgtttcatcgcccagcttggtgtggaacatgcccgcctctgcgatgggcggcaccatcgcgcgcagcgcggccggccagtagtcctcgaacgtggcgcggcgcgcatcggggtgcgccaggcggccgtacacgcagcgcggtttaccgggcgagaccagcacggtttcagtgctcaaatcctccgcaaaccgttcgctctgcgctatcttgctcgcgtacacgcaatacggtgacagcgttgcgtgcacaaactcgacacagtcatcctcgtgccagtttcgaatcacgacaccgcagtactcgcacgtaaccgcgtcgtccgcgtgctcgtatctaaacccgttcacaataaggttattgacaaacgctgcgttatcgatggggaagttttcaaacgaattgtgccggtcgatcagcatgccaaacacgttctcggcggtggcgtcctgctcgtcctcgcgcacgttgatcacgtacagtaatggcgcgttcatgttgcaagcgtggccgaaataagcagcgcgctagcgtcgttttggcgcagcgacacgttgaggtggccgattttacagcgcgtctcggcgtttacgacgtgcacggtagacaaatcgtggtccagtaccacaaattcgtaatctaggacgttggtaatgtagcgtttctcaggatcgatcttaaagttaagcttaccgagttcggccagcgcggcggcgtccacgcacttgtccagcgcgccgttgctgaggtgccgcaaaattgcgtagtggtgcagcttaaaaggtgcgcatttgctggaactaaacggcaggtttttgagcaaatcatcggtcgtgaatgtaaacgcgccttccgcgcacgtgttcggcaaaacgtgctccatattttatatataccttatttcggggcgcgcagccagtcacagtccagcagccatggttagcaaacgcgcaaaccccgataacgacgaaacgcaaggttcgaagcgcgttgcgcaagaaacgcagctgatgccgttcaacaacagcggctttattatgacgatcaaggacgacggtgtgcgcacgtttgcgcccgtcggcgccgtgcaggcgcagcggaacatgggttggcagcacatggtgctggccaactgtcgcgcgctcgactttaccgccatcaacacgaactacggcgacgtgcagtacctcaaagacaaatttgcagagttaaaaggcctgtccaactactacaagtggcgcgaagagccgcagcccgacgacaaggtgtgcattatggagccggccgtgggcaaatgcacttacacgattgggttgcgcgtcaaggggcgccccaacggttttgccatttcggaaacgggcagcgtgcaccgctccaaaagcacttacgggcaatttttaagtacgacctggtcgtccattcacgagcacaacgaggtgtttggtaaggtcatgaacagctactacaagtacgaatacccgttgaagcttgagtctagcgtgtgcgcgcatttgccggaaaaggagcacgagcgcgaacttaaggcgcgccagtttttgtgggtgaggcgcgaaaacaacccggaggtgtatgccacggggcagctcgaccggcccttggacgtggtacccatgacgctggacgagtttgaccggctgtttgagataggcaagacggatgggccgtcgcaggaggtgccagtggtcgtgtgcgggcgcatcgacggtgttaaatacggcaaagagattcaaatgacggacgtcaacggacgcaagtttagcgagaaaccgtattcgttggcgtttaagcccatattgtaccttcttttagagccataataagcaaaatggaagccgacctttgcgccgcggtgaacacgggccgcgcgcttctcaacgccgcgtttaagcagcaggataaaaaaattgccaaatattttgccaagccctgcgagggcggcgccgaaaagatgttgatgctggccgccgacatctacgggcagatcgagcagttggaggcgctgctgtccgtcgcgcacgcgcccgactccgagaagcttgagtttgcgcgggactgctccgatttggacatggaccctgctgttttggcgcgcgtgtgcgccggcgacgcggcacactttgccaccaagtacggcgcgtcgcaggcgctggcgcggtacccggttgcgtacgatgcgtttttgaggcacagcgaacgctttgcggatgccgcgcgcaatttaagcggcgaaaacgtaaaccagttggtgaagagcaagtgcgcggccattaggcatttgtgcgctttagagtatttggtcggtttgcacgtaaataaaataaattaaatggtaaacatgttttatttattccaattgtacgacgcggtgcgcgtagtgcgtgccggtgcgcacgcgtttgccgcgaaggtagtcgatgccgatttcgctgtcgcacgctacaacgcggttgtgctgcgcggcgcgctttaccgagttgaggcgccgcgtcgccagctcgagcgggttgtatagagtcgatttttccagcgtaaaagagttaaggtggcctttgttaaaccattccagcgttactataatgtaaagcagaaatagcgttgttttgtcgcaactatcaaaggcatatttgttttttaaacaataatagtaaaactttagagaattatacaagtaaaacatgaaatggtcagccttcatgtagaattccacgtccgttacaaacagcaggttcacaacgcgggtttgcaacaagctggttagtttgcgcaggtacagcatggagtttttgtcctcgtccacgaggatcagcagcacgtgcggcgtgtggtcgttgaacacgagtttcaaatcttcggcccgcaacgcgcgcaccacggtgcgccagtgcgccgccgccacctccagacagaggtattttttggaaaacacgtgccgcttaatgatctcgctgacggacgagatggacgccaagtatttttcaaacgccgcgtcctgccagccgcgcacgttggccggcgccgccgtgtccggctgatgcttaaaatccagcccgctttgtatcagcttggtggtaatcaggatgctgagctgctggcccagcgtgtaatggtcttcgtacccgcgctcccacatgacattgcacgcaaacttgatcaggttgtccacgttaggttgttgcaaaatgcggcgcagcctgtccgcgtcgcctttgtgccagcggtcgcggcacaccagcttgagcgcggccgcgtcgtgcgcgctcaacgccggccgcgtaacgtccacgtagtcgtccacgtcctcaggcgtggcgcgcgttacgtgcgtcagcgcgtgtagccggaagaccttgacgtcaaacacgaaccgcacaaagccgtcggcgttcacttgcaaatcgcggcgcacgcgccgcggcaggcgcacgtccgcgccgctaatgtataagttgtacagcaacaacgcgtcttcctgtgcgcggcacaccgccggcaagaattgggtcgtgtagtgcagagcttgcgcaaacatggagtcgctggccattgcaaacaagcggcagtttcgggagcggctggcctacgtggccgacatcgcggcaatgatgcagcgcacgctggactttatggccttgcaccgcgcgtgcacgcgcgccgacgcggcgacgctgtgcctggcagacgacaccgccgcctgggtgtgcggccgcaccgacacgtgcacgttcgcctcgttccgcgtgcgcatcgccgcgttccagcacccctcccgcccgctggcacactttatgtttgaagaaagcctggcgcaacgctgtagcggcccgctgccgcgctacacgtacatgaattacgcactgtttcgagacgtgttggccatcaagctgaccgtgtacataggtgacccgcacgccgacgggttgccctactttgtggactttgcccgaggcagcgcgcgcattcgcgcgtccgccgcgctgcggcccgagttgccgccgttcgagcggcacgtggaggaggtgatagcgcagtcggtttccgaatagccgccccgatggacaccattaggctgcagctgcgcgaattttttgcagcggatgacggtgcgcagccgcttgcgctggacgcgccccacctgctggagcaccagcggcgcgcattggagtggatgctgcagcgcgagcggcggggcgcgccgcgcggcggcgtattagcagacgacatggggctgggcaaaacgttgtccgtgcttatgctcattgccaacgacgccgccacatgccaaacgctggtcgtgtgcccgctgtcgctgctgcgccactgggccgcggagagtggcaaatacggcttgcgcctgcagctgcgccaatttcgcaacggcgaccccgacgccagcttggacgggccgcaggtggtggtgacaacgtacgacacgctgcactcgcactacaaactgcttaagacgcggcggcgtgccagcaacctgctggcgcaccgctggcaccgcgtggtgctggacgaggcgcacgtcattaaaaaccgaaaaacggccgtgcacgcggccgcttgcgcgttgtccgcggaaaaccgctggtgcatcacgggcacgcccatacacaacctgcactgggacatgtacgccattatccattttttgcgctgccgtccgtttgacaatttaaacgtttggcaaatgttgaaccactgccgcaacgacacgaaacgcataaaaagtgtggtcaaaaaaattgtgctaaagcgcagcaaagaggaagttgcgcttgacgttccgccgctgagcgtggagtatgtacccgtgcgtttcgacgcggcggaaaaggccgtatacgattgcctcaaaagcgagtcgcagcgcgcgttcgacgaggcggtcgcgggcgcgccgcgcggcatgcaggccgtgctgtggttgctgtgccgtctgcggcagatgtgttgccatccggcgctggccaagtgcgcagacctgttcaaggaacaggcgcacatatttgagcccggctataagagcagcaagtgccgccgcgcgctggaattggtgcagcgtgtgctggactcgcccgacgacaaggtggtgctagtgtcgcagtgggtcgagtttttgcacattgtggcggagcagttgcgcgcgcttagcgtgcccgtgctgctgtacacgggccggctgcgcaccgaggagcgcgccgcggtcgaaaaccgctttaacgacgccgactcgccgtaccgcgtgctgctcatgtccatcaaatgcggcggcgtggggctgaatctaacgggcggcaaccacctcgttttgttggagccgcactggaacccgcaggtggagttgcaggcgcagggccgcatccaccgtttgggccagcgcaaacgcgcgcacgtgtacaaaatgctagtggacgaggaaaacagcgtggagcgctacatgaaaacgcgccaggacaaaaagcttgagtttgtcgacaaggtgtttgaccgctctgtgcccaactacgacgacattaaaaagtttttcagcttgtaagcatgaacgcgcagtacgccacgtgctttttgtgcgacgacgtcgtgtacctgttcaaaaggcattttcctaacacgtcccgtgcggcggcggcgatgtaccgccgccgcacggccattgtgcgcggtggcgtcgtactgtgcccacgctgcaactcaacgctcaatggcagcgataagcggtgcgcccccgcactccgcggcaaccctaattagcgacgggcgttactttgaagtggtgagcgaacccgacggttgcgtggccctcaccgtgcgccgctacaacccgcacgtggtggggtttgcgggcatccgctcgcacacgctagagcggctgcgcggcttgggcctgttgcccgccggcgctgcctgcgcagtgcgcactgtgcccgccgcgtgcgcacgctgccggcgcagcctgacgttgtttcccgctgtgtcgtgcctgccttgcggccactcctgtttgtgcgccgactgcgacgagctgctcgccgcgacgtcgtgctttaagtgtagtattaaaatagagtttaagctaaagtatagaaaataacaaattaactggttcaaataaaaataataaaatacaaaaggggttttatttttaaaaagtaagcgtcgtttaacatgccgttcacgctcatcattgtgctggtggtcttgttatttttatgtttgttcaccagcagcaacaccgtcaacaacaaatcgtacgcgactaccgatggtgggcggcaagccgcgttttttgcgcccgccgcggccggcgacgaactggtcgagtttgagcgctggtttaaaaacacactgtcgcgcgtgtttgcgcaaaaagcggaaaaggtgaacagccccacgcgcgcctggaacagcgagaccgtgttcgacaatttgagcccatggacgagcgcgtccgactttggtacgatgtgccacacgctgatcggctactgtgtgcgctacaacaaccagaccgacgcgttgtaccaaagccccgcgctggccgacaacttaataggcgggctgcgcgccgtgtgcgcgcgcctgcccgacccgccgccgcaccgacaggcaccttgggggcccgtggccgactggtaccattttagcattaccatgcccgaggtgttcatgaacgtgactattgtgctcaacgaaacgccgcactacgaagaggcggcggcgctgacacgctactggctgggcctgtatttgcccacggccgtcgactcgctgggctggcaccgcacggcgggcaacgcgatgcgcatgggcgtgccgtacgcgtacagccagctgctgcgtggctacgcaccgtggcagattacgcaggaaaccggcgttcaggaaacgctgcgcacggtggcgttcccgtacgtggcggcgggcaacgggctgcacgccgattctatctacatcgaccacatcgacgtgcgcgcttacggctaccttattaactcgttttttacattcacgtactacacgcgcttgtttggcgcgaacgcggtcaacaccgagggtctcacgcgcgccattcaaaacgttggcagtcccgagggcgtggtggtgccgggcgtcatgtcgcgcaacggcacgctgtattccaacgtgatcggcaactttgtcgattaccccatcgccgtgcactcggctgacctgtccaaagtgcttaccaagctgtcggacacgtattacggtgccgtggttggcgccaccacgcggctggcctattacgaggcagacccgaccaacaatacacaggcgccgctctggaccatggcgcgccgcatttggaaccgccgcgcgcgcgtcgtcaactacaactctaacacggtcatgtttgagtcgggcgttatcctgcagtcgcccggcggcgtgctgcgcgtgcccagcaccaccacgtccacgcaatcgttccggccggccgtgggccaaacggcgctggctaaaacgcgcaccgcaggcgccatcatggtgcacgcgcgttttgcggaaatgaataacctgcagtttaaatcgtgcacactgttctacgagcacggcatgtttcagctgtactacaatgtgggcgtcgagcccaactcgttgaacggagtcaacgggcgcgtggtagtgctcagtcgcgacacatcggtaagcaccaacgacctaccgtttgaagcgcagcggctcaacaacggcggctcgtccgacggttcggcgttcaaacggggtcgtgtgtcatcgagtgcccaattacaaactttaccgtgccctcgcttacagtgcgaagccccaacgcggcccgtggaacttgtcgaacaagttattagttttcaaagcatgtacacggcttcggccaccgcttgttttaaattaaacgttgaaggtcattcggacgccctgcgagcgtatcgcgtaaactcggacgaagtcgtgtacgtaactacgggcgcgggcgtcaaggccttgttcgcatacccgtggctcatgctcaaggaagacacgactgcagtgtttatgtccgccaacgaagatttggaagtgtcgtttggcgtaatcgcaaacgccttcaccgccatcgacgaacccaccctgcaatactcgccggtcaactgccacctgcacggcaacgggtttcgtctgaccgacgggccgcccaatttgcagtttgtttttgacattctcaactaaattaatgtaagctaagcaacaaacgatctgacgtaagactgactaagtaataaaaccattacaattgtttaatattttatttaaataatgttatttacaaagtttactaggtattgtttgcgtgcgcaacaaacggtcaatcctcacggccaacgcgtgcgcttcgcgctgcgcggcgccgcactcggagcggtacaaaaactcgcggatgctgccgtcgctgtcgcgcacgcccatggaccggatctccgccgtgatgcgttcgtgcacgcgcgcgtgttcggccaggcgcgccgtcaagttacgcgccgcgccgcagatcttgtgcagctcgtcgtcgggcagctgttgccatgacatgtctggcgcgcccgcgcggcgcgtacctttatataccacgctccgccacgcgcacgtcaagctcgataaactcaaacccgtttttaagcacggctgtgagcgagtcgacgacgccgccgacgggcccggtgaccttgccacccgcactgtgctggcgcacgtacacaacggcgtcgccgaccaccatcttgcccaagcactcgtacggttgccgcagcccgctgatctcgatgtcggcggccagcgcgccgggtttgaggcggtcaaacgcgaatgtcacgcggttaggactttcggccagcgcgcggcggcacgcgtgatgtttgtcgatgcgcacgcgcacgttttgcagggcgtccatctcactgcgcgtctttgcggtcactgcgcgccagcggcgctaaatacaagtccagcgcgccgtgacttcccacgcgaaaacgcagccgaagcggcatgttggcggtcaagcccacctcgacgcttgcgtccaagttgctggcgcgcgcgagcgtagttaaatagtccaccgcaaactcctgcgccagtggccgggccggtggcgtgcgtagaatcacggcgccgcgcacgccgccacccgcgtcggccgcaaggcgcaggcccgccgagcccgcggccagttccatagtggtcgcccccagtcgctgcaggtcgcggcacgcgcgcgccagctcgctgctgtgtacggtcagcgcgcagtcgggctttgcggtgggcacgcccaaccgttccacgtccaggctgacctgcgccagtgttaacgcgcgggcgcgctgcgtaaaatgcacgtgattgtcgggcgcgtccacgcgcaaggtcagctgctcgcgcgggtcgactgcgcgcaacacccgaaacagcccgtgcatcggcacgctgaaagacactttgcgctcgcacgcgtaacgcgcaaatccggcgcgccccaaacgtaggtccacaagcatcacccgctccgcgtccattccctgcagccggacggcgaccgcgttgcaatcgaacgtggcgtgcgacagcaggccgcgcaccgcgtccacaacgcccagcagctcggcggccgtcgcaaaggtagcttccaccattgtggctggaatttgcagtgccgcgcgggcttttattattgcgttttcatgagggcgttgttgcacatcagcaggctggccatcacgtcaaactcgccgcaatcttgcggcaggccggacccgccgcgcatccattgcaggctttccgtcaaacgattgcccacaaacgattgatttttggtccattggtcaaagcgcgtaccttccactttttcgtggccggtatagttgtttctgttaaactccttgtaaatgttgtcgggcgtgttgttaaaaagcatgtacggaatgttaaatatgggatagcggcgcgcggcggcgtcattgtggtcgccgccgcgcaccacgtacttgcgctcaatccggtcaaagttggattgacgcgacaagaacgacacgggcgacaggcagatttgcgcgtgtgtgccgtcctcggccatccactcggtaagatcttcgctgcggttgagcacacccttttgaccgtgcacgctgcacactttgacaccttccaaatcgtcggtggatgtgaccacggtagtcttgattactaccacatcgccggccagcgccatactggcgctcaacgattcgacaacttggttgcgcgttttgcgaaaaaacacgtacaccttgtacacgttgaacgcgccgttggtgcacgcttcgaccatgcagcgcttgccgtcgtgcgcccacgccactttgacgctgctcaatagctgccccgcaaagtactgcaccatcccgtcgggcagcggcggcggcgccgcgctgcgcgtcgccggcaataaacttaagcgcggggcggtgcttttgcccacgagcgccagcttgcctttaagtttgttcaccttgttgttgaatagccgaatcggcagcgttatgtgcgggatgtaggggtcctcggcggtcatgagttttgagtcgcgcaccagcgtccacagccgcaccattttgttgtttagcagcacgccgtcgccgaccgccacggacaggccgacgggcggcgcgccgcgtttactgtacggcatgacgggcatggcgttttttaggttggtcagcgccacgatcattttaggcacggggatggtgtagaacaggtgcgtgtactcagcaaaatagtactgttccagcttggacatgaggcagcgcacgtcatcgccctcctcgatttcgtatttgcccactgccgagtcgtgaaacagcgaactcttgtaatggtactcgtacggggtgagcagcgcatgcaccgtggcgtgcaccggcgccaagatgcgtaattttttggccacgcacaccataccttcgtgatggttcacgtacagaatgcttcgcgacgctttaagctcgatcgggcaccggttgatcttgagcgtgtacacaattttgggcacgtcagcgcggcggcatttgaggttggtgggccggtcgttaaacgcgatcaacagcgaggcgtcgtcgcaatgcgccaaatccaacaccggcgttgccagtcccgcacgcagcagctcgtggaatttgctagccaccaggtcgtaatccacgttgggcagccgcgcgttgcggcacaaaaaaaattttttgcccgccacggtcatttctccgtgaaaaaagctgccgatgaatttggcaaaatcttttttttgctttagcatcttttggcgcacgctgtcgttggtgatgcgcgtcacctcgttgccaacgcgatacttgagcacgggcagcgcaatctcgatgttgttgttgctacagttgtcctgctggctgggaaacgaacgtcgctgtttactaaacgtcttagacacgcagtggatcagccggccgttgaccacgctgtctacaatttttttagactccttgccgtgcagcacggtttgccctttgcgacgtttggccggcggcgcgtcgcagtcgttgggttggccctggtattgcaacactgtggacacgagcaacagctccattaagtacgcgtgtttgtaaattatcttgttggccaggttgtcgatggaatagcaaatgtcgtggttcatgatcattttaatgtgcttaaccagctgctgcttgtgcaacttgctgaatttaaacaaaaagtcgagcgggcgccacttgccgctgctggccaagtacgtttccagcaccgcgtttaggtcgttggtgaccacgtagtcggaggcgtacacgtcgcgcgcaaacagcgcgtcaccttgcttgtcgtacaccaattgaatagcgcgattgatgtgcttttcagcgtccacgttgccgtacaaaaacatgcgcttgcagtgcttggcgtacagcttgtcgtaaaagttgtgaatgagcacgttgttgttcatcataatgttgggaaagctgatgaagcgcccgtcgagcataaacgtgccccgcacgttgttgagggtgtcaaactgcgcgtcggccgcgcgcagccgcgcatctagcgcggtgccaaacaccaccagcacacagcggtgcagcacgcaggcgcgcctactattaagggcgcagcacatgtacgatttgcgctcctgtattgcggccaagctcagcggcgcgctttccggcaaacagcaatccagcacaagacgcaggccgtgcgcggtttccagcttggcgtacagcgcgtcaaagtcgcgcacgacgtccgtcatcgcgaccgcttcggcgcgcactgatggccacgacgcgcggcgcgctaaagcgccacgccacggaagcggttgatttgggcacgcaattaaagcaaaacagattatgcgacgccaataccacaagcgacattttgagtcattgccagctggaggaaattgattattacgaggcgcttaaattgtcgtttaattatgaccaaacaacgagcgacacagactttgcgctcgacgtgtttcggaaagccaacgtggtggctaaacaagtacgcaaatatcgcaagttgactgacatgcactacaataattcggtgcgggatgtgctgatgctaattgaccgcgcgcgcgccgtgctggccgacccggccaggcggcggcgctacaacgctattgtggcacacaaaaacaccaatgtacaaatcatatttgacaggctcatgttacggctggaacaagtcaaaaaagagcttgaagcggccacgcaagattacgcggcgctggcggccgccgcggccgctaagccaccgctggccgccgcggccgcgcaacggctggccaggtggctgactgcccagcccgtgcagccgcccaagcggtcaagcaccttgaaccgcgtgcttgttcggtggacgccgtttgcgcaggaagaaacgcgcggcaaatcggacattgagcggatggtccgcgaacagtttgcacaatttggcacgatcgtcagggtgtatgtatgcgactcgcgaaccgactcggcgattgtggagtactccacggcggaggagcagcggcgggctattaatgaaagcgcggcgcccagcgtgcgcttcaccgtgaccgagtacatgcttaccgagttttacaattcgcagctaaaaagcaatttgcaagccagaatagtcaacgttagcgacaaaatagacgaattgtatcgaactttcacaaatttaaaattgcggtatgaaacggaatttgataacagtctcctataagttcgccgctgcgtagttgggaaatttttgcaaactataatagcttaaatcgcacgttattgaagaacgtattatgttttgatgtgggtaacgacctaataaacgtctgaacgacacaaacatttaatttcgttcgccgtcaattatattgaattgcgcgcatgttgtcgagacgtgacaaaacgattgtgtcgcccacgcgtctcgttattacataagggcacgtttacactatgctgctttgcataagggcacgtttacactatgctgcttactgtacaccttaaagaccggcaatattatttgtttaaattgttctgggaaatctggcccgcgtgcgcggccgattgtggtatctgcttggacgctctaggcgcggcgggcggcgtggtcggtttgccggacagcgggctgttaaacctggacaaaatgttccacgccgagtgcatcgcgcgttggaagcgcgaacacgcgcgtgacccgtttaaccgcgccatccgctactactttgcgttcccgccgcccacactgcacgaatgccgcgcgctgctgcagcacacgcgcgggttcattggcgacgacgacacggaccgcacgtacgcggccgtgcaccgacgcgtcaccaccgaggacgcgctggacgtggagctggactttgcgcgcttttttaaacatggtgcacgcgctgacgacggcggacgttgacctgatagcaaatgtgttaagggacaatttgtttttggtgggcgacaactacatcatgtgcaatgtctttaaccaggaagccgatcgcgttgaacccgtgtgcctcggtgaaattggcgccgtacaagcccatccgcccggccaagatgcaatgctggatgcatcctcgacgagcgacgtgccgagttcgtcgctttcgcaacgcctaccatgatgaacgcgatcaggccggcctgctgcacgtgacagtgtacagcggcatgtttttggacgagcgcgcgcaaccgtactacaggcggcttttgcgcaaacgcaccgacgccgccgcggcgcggcgcgcgttccttaacgcgggcgacgtgcacgactgcttgttgattgagccggcgcccagcgagcggttcaaaagtatcgaggaggcgggcgagacaaacatgagcacgctccggattgtgctcgccacggttaccggctttttgggtcgcgtaacgcccaacgaatacttgttaatcgtcgaccggctgttcgttgacctcgtgtattccgagtttcgcgccgtggtgctgccacagcacgcgtacctgttacagcgcgcgtgcgcgcccagcgacagcgagagcagcgacgacgagcgctgcgaacgccgcgtgccaccgccatggaaccagattgtagatgcggcctacgtagcgaccgcggacgcgcagtacaacgagtggcagcgccaatcgcaatatatttaccgcacatttcttgtgtatgtaactttgctcacggctgtgttgaagcaaagcaacccgtttatcattagcagcagcagctccgcgtcggtgatactgcgcaatttaggcaagtgtcccgacaacccggaacgcgtccaatgctgcaagctgactttcggcggggcaccgccgggacacttcatgtgtccgccgcgcgccattgtcaagaaaatttatagttacattaattgggcgttaaacccgcacaaagaccggcggtacagcacgttaattgcgcgcccggcagacgccgcaacaggtgccggctcgggagatttacgagaaaacattaacgatgatttgcatgcggacgactttacgccgcttgtcctgctcgactgggacaactttgtcgccgcgttcatggactattttggcgctgcgcccggcgcgccgccggcaagtatttaacggctgacctatttgctgaacaaacactgttgtcttggcatattatcggctggtcgccaacatgaaaaaagtgtcgctgggaaaaattatagaaagcattgtggatgacaaatacaagtttcgcttcagcggcgagcggtcgtccgataagttgagcctcgacgaatattataaaacgtttgaggccaaccgcgtcgggcaacagaccacgtacggcgtggtgggcaaacgcgactatggcaaagtggaccagttggtcaaaaaatgctagcatgctgcgcgcatcgcgccgtcgtttgtgggcgagcaagcaaaccggggagaaaaacgtaatgctgtgtttaaattgttttttttttttaattaaataccatgttgccattttctgtaatattgtcaaaacgtcgcactaactttgtattgtttgtacaatattaatatccacattttactttatgttaacgctttgtaaatggctgtcgcgttgcaataattttatatacaaacaatggagcttaaaaatattcaatttgattgtcgaccaatcacgcaacagccattaaaggcagaggaaactttaacaaacattttattaaaaaacaaagcattgttaacgtttcaccgacatcaacaaaggtacaaaaaaattttgacctgtaatgatatttgtgacatgaattgtgttttaagtgttgtatatttagttatgatgggtttttctttatataaaatacatatctgagtgaatatttatatttttatagttgtaatttaatattagtactaactttactttgtgtatatttagcaattttaataaataatgtgatgacaaattctgtcgcaaattacacaagataaacaattgccgacaaatatttagacaatttcgcggttgcgaaacccaaaacttgaagctattatacaaattgtcccaacctctactaccctttgtgttgataaagacatttctccaaatatttgtggttttatttacattgttgacgttacaggaaaataaaccgtgtttgcaggccgcagcgcttaatttggcttgtaaagattattttgtttggtatataaatacagttttcacgcagacgctgtgttattatgttcagaagtttagccgtcgagtggacgttcgcgatgctgtattccgttcacgcgcgtcgtttggagtttgacgatgtagttttggacctgagccgggtcgtgtttaccgtggaccccggcggcaacgaagaatacatagtgtttttaaacttgaagcgagcttttttcaaaaacttcattgtggcttgcgacatgtctttagaaacgcttgcgctgcacctgtaccagacggcaagcttgacggtggcaggcgtcgcgccgccacgcgcgcccggctttgtggaacacatcagtttcaacgcgtcggaccgcgaccaatctataatagtggacctggcggcggacgcgcgcctcgtggtggcgcgccgactgcgtactaacgagtggtaccatcagcgcgcaagcggctttgcggactttcagcggcggcacgagcagccggccgcgcccgtggagagtgacttgaacaaacggaacgtaatggaccgcgaactagaaataacgctatacaccagcgacctgctgtgctaatactcgtcctcgtcactgctatcgaccggcttgaaacgcttgcttgcaaccacctgtcgcgcttcgttgcgtacggcgggcttgcgttggcgcgcggcgcacgctctgttgctgtctgcgcgctcaagttcctcttcgctgtctgcgcgctcaagttcctcttcgctgtctgcgcgttcaagctcctcttcgctgttgctactggcgcggcgccgcaccggctgcgggtcgctgtcgtcggacatctcgtcgcgtatgatttcgtacgcggcgcgccgcggaatccactccagcccgctgacgcgcacgtaacgctcttcaagcgcttgacgcgccttttgcaaagccgcgtcttcgtcgccggcgttgggcttgtggtgctgcgcaaaggccttcacaaacagctgcttggcgcgccgcggcattttctgctcatacagcgcgtcggccatgtggaacatcgtcgtcggatgaggagctttcggagctggtggtgtcggtgtcgttggcgtcggagcgcgcttgccactggccgtgcacgcgcgtgtactttttcctgacagcgcaaacggcgagctttgcggcgacttgtttagaaccaaacttgcgcaaactgcgttcgtagaatttgtggaatatcctcttaccgttatgtggcaaattttgcaagttttcaggtagcatatcagtaatgacaatattgtaattaatattaaaacactatattggtacaaggcgttttatttacccaagggacggatgaatggcaagagcgcacaaccatgagattcaactagatcttacacttaccgctagattatgttttgcaagcgcacagagattcaactagatcacttaattacacttaacgctagattatgttttgcaacatgctgtcaagctcgagcgcgccgacttttttgtcgacgtcaaacaggcaggggttgttggctttgaggtattcaatgtgctgctcgtttttaacaataaatacgcggcttttttcgtcgcgacgcaccatgacgccgtgtttgcaaatcgaaatgtacttgtacaggggcaacagcgcgtcgcgcgcctttttcagcaacagcttttgctcgggcggcgcggccacaaatattttgacgggcccgtcaaagtcaataccaaggctgtggtttttaaggcgctgctcacgcgacttgctctgccactcgcgagcgcgcgtcgcgtcgcttagctgcgccacgatgtggtttttgtaaaacgacgaatccagcacgtgcctaaactcaacgtcgagcagcgcgcaaatttttttcagatattgcgtgcgcacccgcttgctggccagccgcgcgtcgtgaatgccgtaaatctcgacgctgtcgttaagccggtcgcgctctagctgctttagctttgcgttcatcaacctgatgtcatccgactcgtcgatttgcgagttaattaacgacttgagcagcgacacgttaattagctgttcgaaccggtccatggcgccaacaatagttacaaaccctcttatagtagcgacggacgcgtaatggtctcgctcacgattacttttttggacaaacccgccaccgaatttgacctcattttggacccgcagaagctcgacaatgtggcgtttttttccaacgacgaattcaaggccgtgctcaaaacgctcatcgcggacctcaaaaaaaagccaaactatttcaacagtttaatggaccagatgattaacgtgtacaattgcgtagccagtgaccccgcgcacaccgccgctttggtaaaagtaattgacgctacatgcgtcattgtcactaacttgccatccaacgtgtttaaaaaactaaaaacgaacaaatttaccgattacattgattaccttattttgcccaattttattttgtgggactacaactttattgtgtttttgaacaacacgttcaattcgaagcacgaaaacagccttgtggacatttcgggagcgctgcaaaagatcaagctgacgcacggcgtcatcaaagaccagctgcagagcaagaacggctacgcggtgcagtactcgtactcgacgtttttaaataccgcctcgttttacgccaacgtgcaatgcctgagcggcgccaacgaagtggtgccgccgttgcacagcgtgcggcgctactttgggcgcgacgtgcaacacgtgcgcgcctggaccacgcgccacccaaacatcagccagctcagcacgcaagtgtccgatgtgcgccttaacgagcgcgacaccgactggaacgtcaaggtggggctgggcatttttcccggcgccaacaccgactgcgacggtgacaaaaaaattattacgttcctgccgcggcccaactcgctcatcgacgccgagtgcctgctgtacggtgatccgcgctacagcttcgtatgctttgacaaaaaccggctggcatttgtgccgcagcaaatttattacctatacaaaaactcgcgcgccgtggaacgtctgctggcgaccgtgccgttagcgctgcacctgtggcgcttgcacgccggcgagcaattttcggtgcgcctagaacttttgcttcgcgattttagcctggtggccagctcgaacgctagctatttgctatttaaagaactgtccgcgctaattcaggacgaggaaatggtgtgtggcgacaaggagctgtttgagctggaggggcagtttgccgctatggtagaaagcggcgccaagggcagcgccaacctgatcaaaagcacgcgccaatacgcgcgcacactgcctacggatgtggatgtagtgtcggcgcgcgctattgaggttgtaaacagttacattttatcgcacaataaagtgcaggtgtgtggcgcggatatttaccacattacggccgtgctgcaaaacctgtacattaaaaacaacaacgtgtgctacaaaaacgactcgcgcgtttgcgctagcatttgcgcgctgccgtccgagtttttgtttcccgaacacctcctggatttgtttataaccgaataaaacaaaaattatttttaaacacgtgtattagttacaaaataaactacaaaataaacaaatgaaaattgatgttttattagccattgctgcagctttgatattttcgctcaagctgttccatttgccgcggtctttaccgcccctatggttgcattgatagccgtgcttgtgttcgtgcatattacgctcgtgctggctttgtaagttgtagtagttgcggcggcgtgtgcgcacgcacgactcgtcgttgccggcgcccacggcttctgcgtcattgcagtggtcctggtattggtttcgcacggctttggtggcacgcgcgtagtggcactcgtcgtcctccgtctcaaacacaaggtcggcgcagttgtaaaagccctcgcccacggggtcgatgcgctgccagcgcacgtacataacgaactgcccggagcggtaaggtaccgacaccgggatcgagtacacttgattgctcgcgcaaagcgggtcgcccgggttgggcaccagcgccgagttgttgccgccaatatattcgagatcgtaccacgtaatggggttgcgccggtcccacgtgggcttggtgatgaacacttcaaagtagctgggctcgtggatcgcggtggggcaaaagtgtacgtccatggaatacgcattttggtagcggttcatgtacagcacgtcgggccgccagttgtagaacggctcgtccatgccgcttttatcgccgaacggtgcggcgcggtcgttggacgcggcgccgcacagcgtgtgcggcaccacgtcgcgcttgaccatctcaaagtcgcggtaattgggcccggccaacgccgcgtactcggtgtactgttggaacatgtattgtgccgccagcgcagcctcgcccgaaggtacatccatggcgcggtatttgtaatacaccgccttgtacgcgttgcggcacgcaacgtctgggatgtcgtcgccattgtaggggtcgggcatgtcgtcgccgttgttgggccaccaaaaccggccgtcccgaaagcacttgtattgccgggcgaccggcacggacaggtatccgtgcgcgcgcactgcgggcgcgaagaacagcgcaaacaagattacacccagtttgtacatgtttagggaaaaacttataataaaagccaaattttgccagtaatttattttttaaccgtttatttatttttgtacaaacaaaatttgtaagtgttgttggcgcacttgggttcgggctcgtcctcgctggcgccggctttccgcttgcgctcgttgatcttgaccagtagcgcacgttttttgtcgtgcgcctggtgctgcatgtaccgttctaaaatggcgttgtagcattcggccagctcgtccttgtgttcatcaccgtagatttccagcagctcgttcataaacgagttcaaaatggtcatgtgcttcagccagctgacgcgcatggtgcgcgggttaaacaagcgcaacgggtgcgccttttgcgtcacgctaccctgtttgtccagcagcaagtacgggatgcggtcgccgttgccgggcacaaagtcggtgcccctactaacgaggatttcgcggcagtggcgcgcgatggtgacaacgcgccgttttgccggcggctcgtcgtccgcttcggcggcgcgccgctttggagccgccgcgtccgccttgccggcggcgtcgttgtacgtcatgctaaaactgtaatcggtcagcggcttgtcattgccgaacgcgtcgaggtacatgagcatgtccgaccgcaagctgttgaggcaaccgcgcaggtcctgccggcgcagcacgtgttctatagcggagcggaacgccacgcgcatgaacacgggcatgtctttttttaccaaccatcccttaaacaccaccttgttgttgttgttaatgtagcagtactttttctttttgagcagcacaagcacgctcatcaggttctcgaacgccattttgtacccgttggtgaatttagcgttgacgcgcgcctcaacggccgcgcagatgcgcgtgagcgtggccatgcgccgctccgcgggcacctcgtcgcgcttaaacacgggcagcacaaacgtcgagtccgtgtcgccgtacagcactttgaaggccagcgtggacaggccaaactcgcgcagcagctcggggtcgtcgaacaagccttcgattatgccaatggctgcggtcaacttttcgcggcccaccttggtgatgtagttggccagcgctttgcagaaaatgccgtagtagccgtagatgctgttggccgtgcgcttgcttaggttttgcatctggtcgtacaagtcatacaaaaactccgattcggtttgattgtcgcggcactgtttcaattcgctgcgctgcttgagcaatttgagcaacaatttaacgttaatggcatttttatcttggttaaggtacatgttgccatcttcgcacaaaatcaggttagttaaacatgcgcaaatgtcgatcatgatggtaaggtacagcgagttaaagtccagcgagaacgcgtactcgtacacgccggcgcgcggctgcagcaccttgccgccttcgtacttgacggccgcgccgatggcgcccaggcagatggcgccgacgggcacgtcggacagcggcacgagtttgcgctgcagccgcttcccgccggagatgatgctcaaatcgtctttgttaaaaaagtacgggtcgagctcgtcgctgcctgcgcgcgtgttggttagcgctaaatgaaaaaacgtgctgctgatcaagtgcgaaatgttgcagataaaatcgtcggtgcacaagcgatacatgaggcattgcgaatacataaagtcgtttagctttaatttgttgaagagccgaatgggcagcatacaatcttgaacgttgtactcgatgatagtgtccagctgcttgtcgttgtacatgcgcaccattgtctgccactctaggtccaccttggcgtcgcccaaatagtatttgctaagcgtgttgagctgaaagtttyccacgtcgcgcttgttggcgtccgckccaaaatacttgtacaggtcaatgtggacgtagtaattaaagtaatatgtatcsgtccsgttaccgattttggtgatgaaaagcttggtgttgggctgcagcgcgggcagatcgtagcgccgcaacgttggtttgctaccttttaaacgcgcgcgtatgtaaggcaggtcaaacacgtcgccgttgtagtccaggatcacgtcgggattggtgacccgcaaaaagtcaaaaaaacacgtaatcatttccgtttcgtcgcggaacacgaccacgtgcgtgtcgtcatttgtttgcggaaactccaacggttctttgtggtacacaaaacataccttgctgaaacaatcgtttttttgcagcgccaacccgatgcacatgatgacgtccgcgtcgggcttggagctattgtgcccgtccgagtgcgtttcaatatcatagcacgccatcacgggcgcgatgctggcggcgagcgaggccgggtccaccagttcaaagtcctccgcaaagcgttccagcgcgaacgggcgcgcgtcgtcggccacacagttgttgcggcaacgctgcgcgcggcgaaaccgcatgtacgcgccctccaccacgggcgtctgcatgtgcacccggttggcgttgcttaaaaacttgtccagcgcggccgccttttcggcgtacgaactgccgtttcgcttgaatttgattacgttaatcttgtccatgtgcaagtccttaacgcccggcgccacaaacgtgttataactcaaacagcggttgcgacacgtggcaaatatgtgcgtgtcgtggcattgcttgtacgagtacaggtccattttcattacaaagtaaaactgcattagccgcccgaccgttcgcacgttgcaaaacaccattaactcgcccttgtttttcatcgtagtaaatgcgcatgacgcggaacgcgtcctctttgcgacacggcaaactcgcgcgggcgcgtaattgcaaaactcctcttttaactgattgtaagtgcgggattttcattttgacaaaatgcagcggtggccgccgaagtatggggacacagacgtcaacacgcgcacggtccacgacttgctgaccactatcaactctatgagtgcgcgaatcaaagcgctagaacggtatgagcgggtggttagtgaaattcacaaagttatagccatgatgcgcccgagcttcaacgcgcaggcgctggaacccgacgccatgcccgcgctaatcgtgcagtttttttctgaatccgcggagcgcaacttgacacacaacataaactacaagtacgactacaacgttggcggcgccttgccgttccagcctccgccaccgcagccgttctacccgcacccgcaatactggccgccgcagccgccaccgcaacaaccgccgcagccgccgcaacagccaccgcaacaaccgccacaacagccaccgcagccgccaccgcaaccaccgccgcaaccaccgccgcaacaaccaccgcaaccgccgtaccctgaaccggcgccaatgtcaacgcgcatagagctcacggaagaagaaacgcgtagctttcaggttttgcagcaaaacatgcagcgccaaacaatcaaatgggagacatttagaaaagctttatatttgcaaatggttcagctgctacaagcgcgcgttgtaaacagcgatacaatcgtggccgtggtgcggtctttgcaaaacattgacaatttaaccaattacgactttaacgaatttctaaattgcgtcgcccgcgaaacgtccgtgcgcttagacttgtcggaacagttgtgtcccacggtggtggcgcttattaaattgtttaaaacagcgtacatgtccataacaagccgtgcgtttatgtacgtcaactccaacgcgctgacggcgtctgttgtgtctgtagaagcaatggttgtccaactggtcacgttttttacaaaaatttatttatacgtgatgaaggtgcaatttgtgtataccgacgacaatcattttgttagggaaattcaggagttgtatgtaaacgtttcttcacaaatgaccagtttgcagacgcaaattcgcgacgaacgcgcgtccttaaacggtctgacacaaaataacagtgatttaattcgggagcgggacaatgtggtacaagaaagaaacaacgttcaacacatgtacgacgagctagacaaaaaatataacagcgcggttgccgacaaccggcggcttgccagcgagatcgcccagctcaagcagctggccgcgcaaaataaaaatttacaaattgctaataaaaacttgtcggaagaaaacataaagctgataaattctctggacaacatgcaaagccagttggatgaatctccgttgtataacagcgattaccgcactttaattgatgttgaaaaacaaaaaacaaaaaaagcggaaacgcgcgttaagcaatctattacagagggcgcggaggcgcgcgaaacaatttccaacctgcaaacaaaaatggcggaattggaaacgcaacttgccgtccaagcggcggaataccagaccgctttacaacaaaagcgtatagagtacgagcaagctgttgcgagcaatggccgcgagtacgttagtaaattagacgcttccactgccgaaatttcgaaccagtacgccaaaatggaacaattaacggcggccaacgctgaactcaccgcgcagttggccaaaagccaacagcaagcgtttgagttgcagcagcaagctatgcaacttgagaaaagggcgttaattgccgaaaaggaacattcgatgggccaaggcaagcccgaagacgtgccatcatcagctttgcgagaaatttacgaaaaggccagggtgttaaacccgaatttaggcccgtttgacaattgggtttcgagcttgagcggcgccttgtcgtcagcggacgtgctcaatataggcgccgtaaatgcatttgcaacgcaaatatccgaagcgttgcagccgctaaacacggtaataccgcccgcaatgcgcttgcttgaggcaaagccgggaagcggcataaatactgcagcgcttctgaacagtttacaatttgtggttaataggtacgttgaaataatgggcgagaacaaaaatttgattaccaattactcgcagcaaatagaggccttgaaatcggagctcgacaaaaacgtcaaagacgtagagcaaatcgacaaactggtccaaaaccaaaacgcgcccggccttaacaaccaaaccattcagtcgttgcaaaaggatttggaaactttgcaaagcagattcgactcgctcaacgctataaaacgcgaacagctgggggagctggccagcgccagcgcgcagattgaattgagcaaattaaacgagcaaattaacaaaattaacattttattatcgtcgtacagtacaataacagcagacatatttaaatggaagtcggaaatgcttaaagtgtacgaatcgcttgcgcgcacaagcgccgaagaagagcttatggactaaacaaaactgtactcgcggtcctcctcgtcgtatttgagcaggcctaacatgttcatgttgttggggttagagttgtcaacggtcacgaacaaaacggcctttgttagcccgtcggcaaggcacgtggtgagctggtcaaaatccatggccagcttgtccagcgcgctagtgtcgctttgcgcgacctcgtccgctttgctgtctacgtaatacacgcacttgttccatcgcggctcctcattgtcacagtccgccgctttgaattgcaccgaaaagctttccttgccgctgtcgctctccttctggtccgccttaaactgcgccaggcgcacgcaaaccaagtgcttgttggcgcggctaatgttgttggtggcgctggaacatttgaggttgaggtggtcgtcgctatccgcgtcgcccgccgcttccagccgcgtggactggcccgccacccaatttaaaaaagcgctttggcctttgctcgtgtattggcaccggacgccgtgcacattaaacaacgtttcagaatttttaaagtaaaggtccatcaactcgttagcatcgtcgcagtttttaacaaacgatttggccacgttggccagcattttggcgttggcaaagcattccacctgctccacgcgcacagtaccccccgcgtccgccatgttgatttcgaacaccattttgtaattgttggcggcgagccgcttgaacacgcatttgagcttggccagcacgttgaccatttcttcgttttcaaaatcggcgcgcgtcaaaacctgtttgaccggcgcagcctcttcgaggattgactcacacttttcataatcgttgatttgaatccattctttaaactttgttttgacaaagtttagattaacgctataacagtcgttttccactaaatctttgaaacactgcgcgtcgccgtagtaagcctcagtcttgttgtccgccaaaaaccggaacgtgtaatagcgctggttatcgatgctgattgtagtcttgtttaacaatttgccaattactcgtttgtagttttcttttacttttttcttggccggctcggcgccggtctcgttcccgtgctcgcgcttggtggccataatgtgggacgcggtgcgctggcaacttttgagtgcggacgaggtggaagtggcgccggagtatcgcgcgctggcgtggcgagagttgattgcaaacgtggccaacggcaccccgctcgactttacgttcaggacaatgttccagcgggcggattttgaaaactttgactacaacacgccaatcgtgtacaatgtcaaaaataaggagctaatcgtgttaaacgaacggttaaaagcggcgctaaacaggcccgtccgacgcagcgatcgcacgatcaatgtgaccactgcgcacccttttctgctatttattcttgttgtgctactgacggtgctagtcgtgtttgcgggacgaccgcaccatgtcacaacgcaagctcgagcggctcaagcggcgcttggccgcgtttagcggcgcgcaaatcaaggctgcgcgcgctcgcttgtttgacgcgccggcggaccggccgcgctgctggcgcaagttggccgagatagaccggcagtttggcgtgtgccgcggcgtgaacacggcgctggacctgtgcggaggcccaggcgaattcgccgcttacacgctggcgcgcaacccgctgtgtcgcatgtttggcgtcacgctggccgctaacgcgccgtacaagcgcgccgtgcgcggccgggccaactttacggccgtcatgggacccgacggcacgggcgacgtgctcgataaaaacgtgctttttgacttgagcgtggcgtgcggcaacgcgtgcgacttggtgctcgccgacggcgccgtggacgcggacggccgcgaggacgcgcaggagcgcctcaacgcgccgctcatcttgcgcgaaacgcagctggcgctgatttgcctgcgccccggcggccattgcgtactcaaagtgtttgacgcgttccacgacgagacgctgcgcgcgctagaacggtttgtgggccactttgcacgctggcgcctggtcaagccgccctcatcgcgcccggccaactcggagcgctacttggtgtgcttgggcaagttaacggtgccgcagcgcgccgcttcgctggcgcgcgcgttgacggttttacacgtcgcagtgcagcatttgagcgcgttaattcgcgagttggacaaaactaagcatggatttgcaaaagtttaactttgtactgttgtcaacgcaaggccgagcgcgcaccatggcgcttatgtcgcttgaccacgcgcagaaaacggacctggcccaagcgggcctgttttttcacaacaacctcgatcaagtgtatcggttgcagcgttgccatggacaagattgacgctaagtgtgtcaagcgccacgcgtattcaagcgactgcgtcgcggccaccaatgcgctgctcgcgagcgaagcgctgcgagcgcagtcttttgcaaggtttaaatgggcgcgccggcaattcgggttgcagccccgcgtcgcgaacatgctcgcgcgacgcgggttttactgcttcaagcacaaattacgctgcgccggctgcaaatgtgtcgtggccttcaaatcggtggaccttgcgcagcgcgcgcacagcgcgacgtgcgcgtttcggcatgttgtggacctggacgcgcacgtgataggcacaattttgggcaccgatctgccgccgcccaagttgcacgaggacaaagcaccgcgcgcgaacaggccgtccgcgccgccggccgacaacaacgtgtccgattgcaaggtgtgttttgacagcgaaaagtcggtgtgttttttgccctgccggcacttggccgtgtgcgcggcgtgctcgccgcgctgcaagcgctgttgcgtgtgtcaaggcaaaatcgccagccgaatagagacgctaccgcagtgatagataagcccgcaaccccttttgtattgtatgcccgccaattttctcacagactgcaaattcaagttaatcaaaagcgcgaccaagactgtgtcggctttgctgtgcaagtgcgtggcgccgcaggacagcgacggtggcgaccgttacacacagattaataataattgtaattttatttacgttaatgtaataaataaataaaactataattaactagtgtaatgttttattgtaattaaatcgataaaaatatttatacagtttttgacgttggcctttagattgttcaagcccgtttggtccgagccaaaacgcaccgcgtccgtttggtacagcagctgcgtgaggcgcgactcgaggccggggaacgcggcgggatcgccgctgtccaggaacgactgcgcctccgcggccaaatctagcgctgcgtcttgcacaacggccagctcgttttgcaaagtggtcatggctcaaaagtcaggtcgcagcaggtaaacgtaagcacaatacaattaggcttaatgtagccggcgctaacgtcgtacgcggccgagtcgccgctcagctcgttgttgagtacgtttagcaccacgttttttaaagtgttgttggcggtcgttttggcggttgcctccagttgttcttcaacaattttgtgcacgcggccccgaaacgcgtcgtcggcggacagcttcgcggcgttggcctccagccacagcttgaacggctcgtccacgaacaactctcgcaaaatttcgtacagctgacggccaagcgagtgcacctcgtcgtactctttcatgccgaggtgcttgctcagcgccatcacggccagctccaccaacgcccgcagctgcttgtaatactcgacgtacgcaggtttgagccggagcccgtccacggtgtgttcctgctcaagcccgcgcagcgcgcggcgatgcggacgcgcgggcggctcctcggacacggtggtcaacgggcaactgtcgctcatgataaacggccttataattggtacacctcgtccacctgcgtcactaaaaagttggaaaggtcgctgacgtcgtcgtccgacagcctgtatccgtccacaaaccgccacgtaatgttcaccattttgcggttgccgaggaacgcgcgcgcaaggtggccaatctgcctatcggtcagcaatttggacgggtctaacgtgttcaccaggccgcaaacggatgcgtcgtctagtttgttgacgataaacatgcgcagcacgcttcgccacttggccgaaaaccgttcgtccgggtacacctgcttgttgagccactcagtaagttgggctttcacaaaaatcaccttggtcacggcctctgtagagcgctttagctcggccacgaacccccgcagcccgccggacatctcaatccagggagctagtgttcttgttgagaattgcgtccagcgcctgctcgatctctagctttttccgcacgctcttagctttatggctgggcaaatcgtccacggccgactcggtattcttgcttattatggcgggactgaccagcacgaacaccagcaccaaaataagcaggtaaaacgcgatgccgttttccttcttgtcaaacaccaggctgagcacggccagcgcgcccagtaacaagtataaattcattttgccttatttcactcgccagcgcggtaatactgcgatgaggagcccgcggacgagccggcggacagatcgcgcgggctatcttcctcgctgctgctgctttcgtcaaagttgtacttgttaaggtacggccgcgtgctggccggcgactcgtggttcatcaagcgcgccaccttctgcaacggcacgccgctgttgtacagattgctgctcagatagtgccttatcatgttgctgcgcggccgctccatctcaacgcccgcctcgtccagcaagcggcgaaaatctttgaaaggtgtggaagtgttttttgaaatttgcaacacggtggggttgcgcgcgtaaatctcgcgcgccagctccagcggcttggttttaatcatgttgagcgtgttgctgcggttgcgcttgcgctttaagtcgatggtgttgctgcgcagcttgccccgttttataagcgcggtcaggtcgtccacgctgagctgacgcgcttcgttaatgcgcatgcccgtgcccagcataatgcaaaacacaatggcgccgcggatcaagccgcggtcgtgcacatagtcgccgttcatcattttaatctttgaatcgataaagtctaaaatggtgtcgatggcacttttgagcataaaatttttttctttttcgcggatggttttgagctctttatcgcgcggcagcatgaccatgcgcggaattttgtactcgggcagccccatggcgttggtgtaaaagttaatggtgagctgcaacgtttctttcgtgaccgaacgcagctcaagcatgcgcttgcacagctccttagggctcaccaacggttgctgcagctcgatcgagtcaagctcccggtccaacgggtacccaacgtcttgcaaattttcctcctctacgagactgaatatgattttaatgagtcgcgacttgtagctcttgagcgtggtgggcgcaaacggtttggaaaacatatacttgctccacaggctgtcgtttttcacctcgtccggcgtgcaccgctgccggtcggtggccaaatcaaacacacgctcaaaccgcggcgccgcttgtatgcgcgccttccactcgttaaacgcgttctcgttccgcgcgccttccatgttgctagtcaaatttgttaaacacaaaagcggggtcgttctccgcgtcgtccgagtactgcgggcgctctcttaatattaaaaagtagtaaatgacgtacaacaacagaaacagtgccacgaacgccactaagctgatcagcacaatgagcccaacgggcgcttggttcgcgggcgcgtccgctttggaagcctcgccgtaatcgtaagcggccgcgtcggccgcgggcgcttcgtcgttaagcgccaatttgagcgggatgtactccacgcgctcgtggctacccagccggtagtagggcacttctaggttcatcgttacgccaaatactggtgcaggtgttgcggctgcgccttgatcagtcgcaacttgaaatatttgtcgcgtttccgcttaagattgtattccatctgcgcagcggtcttgtaatcatacgcgctcgcgctgcggtacattagttgcaatgactgcgcgcatcgcaaaaaccgcgcgcccgcgccgcgcgcgtgttggcgcaaccgccggcgcaggtcgctggtaatgcccgtgtacaacttgccatcgtcgcgccgcacaatgtacacgcaccacaccttgctcttgtacaaactcattacgcgcgcctcaggaatcggtccgcgtccgcgttgttcataatcatgaaaataaaccgggtgagcgtctcgcactgcgcagctagctgggacaagctcttctggcacgcgctctgggtcaagtgaacggccggcgagtcgatggcgttggccgccgacgtgaggaacgccgcgccgtcaaacatgtcggtgcgccggcccgattgcgtggccagctgcgccatgtaaaagaaaatgtcgttggcctgcgccagcgacggcgccaccgccgccaggttacgctttaggtttataacgcgcgaacggtttttttcgttaagcatgtagtaatagtaggtgcccccgttggcaaacaggtcgtcaatcgccgaattgactaagtcgttcaccatgttgatgtgcacaaagctgcggctattgacggcctctttgacgttttcgggcagcgtggcgcgcttcaacagcagcgtcacgtagttgttggccagctgttggtcaaacggcagcggaatgggcatgttgcacgtgaccgcttccgataccatgtattgcaccgccaaactgagttgcttggccgcttcgttgatagcgtccttgcccagcgaatccgcgccgctgttgtagaacttttgcgcgtatttgggcaacgagttgagcacaaacgacggttgaaaaatgttggcgtccgaggcgaccgcctccgccacgctgttttgtcgcagctctttctgcagcccgataaggtggcgcacaatttcctcatcgctctgcacgcgcttgatgatgttcacgctcacagggttactgtcgatgcacatgtcgcggatggtgttgataaattgaatcataagcggcgttagctccgacatgtcgttgcaccggtaatagcgaatgatcttgtgcacgtagtcagtacacttgttataccacacggactcgtccgctttaagcgagccggcgcgctccatgcgcgcggccgtggacacagcggtcgggtattcgccgctgtgcgcgcttgtaaaagttgcgttggtgggtgcaaacggatggcccgaggggtttaaatgaaagccgtcgcgctcattcatggttttttaatgcgttcttatgattgcaaaatgcgacgtgagggttacttataatataattgttatggcaaaacagcgccaccagaatcagcataattacaaacaggttgagcaccgaaaatttctccacgttgaacagcagcagcagcacggcgcagcccaatagcagcgtctgaaagctcacgcgccggcacaaaatgctctcgcagttgcgaaacgccacgttgaacctgttctcgcccgcaacgtaccggcgcagctccgccttgcagcactcgtcgcacaggatgtgcactttgatgattaacccctcggtgtgcaccgtttgaaacgtgcgcggctggctgcccgggtggaactcaaactcgtagccggtggaggtggacacctgcgcaaagtaatgggccagaatggacgcgcccgtcttttttactttcaccttgtacaccttgatgacgttaatgtcacactgcggcttgtcggcgccgaacccgtcgtacaagtactgtatcagcagcgcgctgtcgtatttaatcttgttcacgctcgtccagtttttgcttttttggcgacggtggtgcgtcgccaagttctgacccagcgcattcggtgtcagcgctttcctcggcggggccatggtgcggcgccggcgcgtcggcaaacttcttactattccacagtctcagcctaaacacggcgccggccaccgacgcgtcgtcccgcttgacgaacagcatggcttgccccgcgcggaggtcgcggctcgacaggttaaactcaacggtgtagtcgccgcaggtgattacagaatgtgggctgtcgtgcaacgcctctagctcggccgagggtacaatgcgcacgtcgtgcgcgcccctcattaagcggtgttcgttctcggcgacaaactccaatacggtttgcccgtcgctcgcggacacggcgcgcgccttcactacaatgtcggacgtggtgctgttggtgctcgccattattctgatcgcgatttttacacttatctattatgcggtgttttttgaattcgacgagacgaccttttctaagcggctgcaggtgttgactgagtacgcaaagcgcaccaacgccgacaagccgacaccggatgtgctgggttacgtgtccgacgtgtacgcgcatacctacatagtgacgtggttccgcaccgacgatttgggcacctatcacgaaaccgtgcacgacgacaccgtcgaaatttttgattttttgcaacaaaaattcagccccgccgaagcggcgtttgcgcaacgcgtcgcgcccgtggccgccgagccggctgcgttcgttctgacaggcgacgcgggtgacgtcatgctgcgttgcccgcaacattttcgatttgattacgcgcagctcaagtgtgtgcccgaagacccgtgtgcgggccgcgcgcctgggcgctaccccatggacgaacggctgctggacgtgttggtgcacaaccagcacgcggacaaggactattcggccaacgcggacctgtaccatcccacgctatacctgcgctgcctggcggacggttcgcacgccgtgcgcgaatgccccgacaactacacgttcgacgccgcggccggcgagtgtcgcgtcaacgagatgtgcgaaagccgcccggacggctacgtgctgccctacttcccggaaactctgctaatcaacgagtttgtggaatgccgcgccggccggcacgtggtggcgcagtgtcccgacgagcaggtctttgaccgcgctctcatggcgtgcgtgcaagcgcacccgtgcgcctttaacggcgccgggcatacgtttatcacggccgacatcggcgacgcgcaatactttgagtgtctcaacgaccacgaggcgcagctggtcacgtgcattagtcgcgtgcgcgacgccgacggccggtacgtctgcgccggcgacgcgcgctgcggcgcgctgcccgacggcactggccaactcgtgcacacgcactccgacgacacttttgggtacgccaccggccaattgacatgtgacaactatgaagttatatctgaaacggaatgtgatgtcggcgacgtgttaggcgacacgttgtttgtagacaagtttaaactggccgtccagtttccgcgccaagtattggtcggcaacgcgtgcgcgcccgccacgttgaacaacgtgcgcgtgcttagcgacacgtttccaattgaaaacgtgtctaacgactatggcgtcgacatgcagacgtccatggtggggttgacaaacatgattgccgatctagcggcgagcgacgaccccgacacggcgttcggcaacaacgtgttgttggcgcgccacatgggcgccgtgggcttaaacccgtttaccgcggagcccattgattgttttggtgcgcaactgtacgacgtgctggacgccggccgcgctaatgtgtgcgacgaagcgggcgacgccgttgtgcgcacactagaatttggcgatggcgcgtttttgagcgtgtttcgcgacgatttcaccggtttggacgcggattataagcagttttgcgccatatcctacgaaaacccattaaaaatcgtaaaaagcgattttttgcaacatcgtatattgaccaatatactacaatcagacatttgcacacgcatatatactacgatgtaccaaaaatatactacactggcgcaaaaatatactacaactccgctacaatataactacactctcgtaaaacggccccgaaatacggtagtatatgctgcaaatataccctctacgatttttgcaccagcatttgaccccttcgccgcgcagcgtccgcgcaacacaagcggccttgaaagcccgctgttcgacccgtttacggacgccgtttggcgcagcgagccgggcggcgacggcgaccactgggtgcccgaagtgtcgccgacaccacagcctgaacttgaacccgaacctgaacccgagcccgaaccgttaattttaaatactaaagatctgttttattcgtgcttttacgagttgccgagttttaaactcactagttgccatgcagaaaatgacgtgattattgacgctttggccaaattgcgcagtaacgtcaaggtcgacgccgaatgtgaatcagccaaagacttgcattttgttttgaacgcgtacgcgtacacgggcaacggcgtcggctgccgctctgtgtttgacggcgaaaccgtaaccgtaattaaagaaccgacgccttcacacgtgtacgctaacttacacacacagtccaacgacggtgtgcggtacaaccgacacgtgcacgtgcgcgacgggcgctacatggcgtgtccggagcacttgtacgacggagtggcattcgcgtgcaacgcggaagctgacaaattgtactatttggacaacatgcaagaactataatacacaccagtttatttttattgcaacacaatctttattattgcaacatcatttaacatgtttaaaatgtttgtattgaaaccaacgttacgcattaaaattgcgccacatttatttgataatgctttcagagaccgtcatacccgaaagccgtgattggcgttgacgcattgcttatattagaacgcgttttacaagtatggttgtacttgaaattcatgatcgtggcgttttgttaaaatataaaaacacgatgttataaaactgtcagcgttaacacaacgccataaataaacacgtgttttgacaacgtttatacccaaaaaactagtttggaaaattgctgcacgttattaaatttaaatgatgcatcgcgcgcttgggtttgcccatgacacgagttgtggttgcgctgacgcaaaaggctgggccggcggccgtataaatgcggcgcagggcacccaactgccgcagatcaccatcatgaagtctcgttaattgtgttaatcgttttgctgtggctggctaacttaaaggcggccgcgctacaccgtcgcaaaaggtagcattattaaataacaaatatttatattattaaaagcatttgttaaaaataaatttattttttacagtaaaatccaatacaccattggcacacggattggttggggcggcgccgagcaggaccccaacgtgtactataaataaaacagcgtgtttgtgtaaaatttatttgtattaaaatgtctacatgataaaagcgttttaatttgttccacgccgttggcttactgcgtagcgcctaaattacagatttcctattcaacgtgcttattgtgactccatttcaaagcccagacgcgccaaggcgaaaaccttggggaaatcacttgtgcgcaacaaataataacttattgttaacgtgtgtacgcctcgctgatccgctacgcaatcaagtttgtaccaattcacatgagagtttcgcgcgcggcgtttttgaacaagtaattgtcgcgaataagtcgaatgttttcgttttccaaatcgcggttgtcacgctccagcttggcgtttttgtcggtccagcggacgcgcttgtttgctagcaacttaagcgcgcgctcctcgctggccttggcgcggcgcagctcttccaactgtttgcagacttcggtaagctcgccgcggcccttgtcgatgcggcgctcgacaacttcgttggcgcgcgttaaaacgccggcctgcagctgcaaatcgtggttggctttggcacgctcgctaatctgcgactgcaaacgcgttaacacgctgcgcaggtcgccgggcgcaaactcgtcaacggactcggcatcaattaaagttttttcaaacagcgaacgcgccagcgacgcggcgtccagcatgccgcccaggcggtcaaactcgcgcacctcgctcacgccgcagcgcatcgtctccaccacgttgcggttcacactgtacacagtgatatgcgtgttctcgtgccggcacatgggacactccacgtgccgccggcgctgacgaatcttgcgcacgcacgtggcgcatatctggtgtttgcacgaatgcagctccacaatgggtataatggtgaccacgtcgacgggctgcaaaaaggtgtttttaatttcgcccaccgaacagcaaatgtggcattgcagctttacgctgtccattgggactatatgggcgcaacggccgcaggctgagcaacaaccgcaggctgagcagcgggcaccccgggcgcggcgggcgcaaagttgttggcgcgcaaaatgttgttttgcaaattcaccagctggtagccgaggaacagcggcacgtacaaagggtattcctcgtagcggcccaaggtacgctccagcgcgcgggtgtcaccttcaaacttcaaaacgtttctgatttgcaggcggttagggcgcgtcttgattatgtccgcgctgcgcaccgggttgtacaactcgctgccggacacggtggccaccaggccggtgtcgttgattacgcaggtgttgcagttgcgcaagcgcaaatcttcattgtcgatctgcaacgtttcgggcgcgaccgcgcgcctaatcaggttgcgcaagaagccgggcaacgtgctaaacactgtgtcggcgttgcccggttggttgccggcgttgtttattgtgaagaaccgcacgtcgtcgttggccacgcgcgaacaataggccagcgggtcggtgagcgccaaaatgttgcgcgtcgcgctgtacacgttttctacgacgctgtaggtattttccataaagttttcgttgtttcgcagcgcggtgcaaatgcgctcaatttcggcttgattgttgtatattaagtgaaatatcagttgctcggacagcatcatgctggataggttgaaaacggttgtatagttagttgcggtgggcaccaaaattcgtttatcgcccgtttctttgtgtccaaccaaatggcgcgccacggtgcgcttgtactggttgtcgtcctcatcaaaaatgggcagtaccattttggccattttaaaacgcagtttcaggtggtaatcacaaatgaaccagccgtcgtccacggacgcgtccgacgaacacggtgaccggtatgtgacgcacgagtcgaagggctcaatgccgccaaagatgcagtggttggtcgaccgccgcgacgacacgtcggcaaacacaagcgccattttttagcgaaaatggagggcggcgactttgtgattgagaaagaaatctcttatacaatcaatttcagccaagacgtgttgtaccttattttggattcttatattgtcaggcgcgccgccgcgcccgcggagcgctacgtggacgtgtacgacgagaacggcgtacgtacgcgcttggccggcgacggtgtcgcgagcgtgcgtaagatcacgctgcgcgacgagcgcttggtgcattggctgcggtcggccaacgcgttggtgccgcttgtgtgccgcgaaaaccgcgaggcggcggtgccgcccgcgcacgcggcgcgccgtctagcgtcgcttgtcgacacaaccgtttaccggttggacggtgtcgacgtcaagtttgagcacgtatacctgcacgccagcggcgtggacaagcacgaatccgccacggcccacaagattgtggcgttgaaaaacgctctgctaaacattagcattgcgcaccccgcgcaaaacctgcagctgggcagcgacgcggtgctggcgcgcctccggctcgagctggagtttgcgggcgcggcgcccaccggcgcgcagctggacgctttttgcgcgctggtcgtgcaaatggaggcgctggccgaccaccaaaacattgcgcccgcgctgccgtacactacactgttggacaaagcggtgccgcgcaagtttgtgcgcgagcacaaaattgcctacggcgcggccgcgttggacagcaccggcgtgaaaaagtgggcttttaaactggacggcgtgcgcggccgcggcgcattccgccgcggctttgtgctggtacagacagacgacatgcggctctattcggcgcaggtagcgcacccgtttgcgctcaataacgtcgtcacgttccagtgtgaggttttgcaagacaaaatttttgtgacggacttgttgcaggtgtttcgctacaagtataacaaccgcacgcagtacgaatgtaatttacaaaccgcctattcgctagacgccgcgctggcagtcgaatgtcttaattacctgcacaacgccgtcggcagcgtcgcgttgccgcagtttggcgagctgcaatttcaacagtttcacgacccaccgttggcgcccacccactacaccacggtcgcaattgacggatacattgtgctggacgagcgcctacagtacgccaaatacaagtggatgcccaccgtggagctggaatacgacgcgcccgccggcacgcttaattcgatcgacggcccgctgctggaccgcgtcatagtggcggacgtgccgctgcagcacaaggttgtgtacgaatgcgcgtttaccgacacggtaataaacgtacttaaggcccgtccggacaggattgtgccctctaaagtgtgttaagcgggtagaacgggcagtcggaccgccaatgctccacacaatcgtcggccgcaaacgagtacgagttgtccgctaacatgtcgcacgacaccgtccacagaggtacaccaaaataattgcagtggattacttgccgacagtcccacggcaccgcgtaagtggcgcggcttgaacttctgcataacggccgcacaaagttttggagttgttcaatcgttgtgatatcggccggaaagtacattggttcgcctagtggttcgggattaggcggcggcggtgaaggcggcggtgaaggcggcggtgttggtgttggaggtgttggcgaaggcggcggcggtgttggtgttggcgaaggcggcggcggtgttggtgttggaggtgttggcgagggcgtcggtgttggaggtgttggcgtcggcgagggcggcggcgagggcggcggtgttggtgttggaggtgttggcgtcggcgagggcggcggcgagggcggcggtgttggtgttggaggtgttggcgtcggcaacggttgtggtagtttgtgcgcgcatttgagcgtggcaagcaaataaaggactaaaaatataattaaaattaggtgtaataacgtaaaaatgtaagccatgcttaaataaaaattataaatttaaagattttttgtaatgttcccaagtcatgcgctcgtggtgcgcgggcggtttcttgccgcgttggatccatttgtagtcgttaatgtggttgtgaaaagtcattgttacgtatgccatcaaatttttcataagcgtgttggtctccgaatctgtgggttctttacaatacgaatccgtaaacgtgatgggagcgccgtagcgctctctgtcaagcgccagctcaacgagctcaatgtggtaaatgatgtagccctttacgttcatgtaatggttgcggcacacggggcagtgcaatataaagaacacattgtacagtaccactttaatggttttgagctgttccgccaccaaatctatgctgcttttttcgcgcgtaagtaccatgtcgtccacaatgaggcctaagaaatggatcgtgtcccagatcgtggcaaacgtgtacgtaaagcttttaggctggcaggaacgcaaattcaattcagcggttttgtccataaactcgatgcgaaattgctcgtgggtggtgtcgggcgacgcgttggtggcccactctaccagctgttgcacctcgtacttttgcacgtccttgtatttcatcaagcacgcaaagtggtaaaagtaagtggcttgcgacgccaacagcttggtaaggtgtgcggatttggacgcgcgcaacaggtcgatcagccgaaacgcgtacagcaggaagctgtctttgtagcgcgaaaacagcggcgttagcggaatcatggcaaaaacggtgcggttgtatttatgcccagtgccagccgcgatcaccctcagcgtaggcgacgcggacgccgacgaaccgatgatctactttgaaaatattaaagaatgcctcacggacgcgtcgtgcgacaagatgacgtactttgccgagctcaagcaggaacaggccttatttatgaaaaagctgtatcgtcacatggtgtttaaaagcgacggcgtttacaacagacaccacgtgctgtttgacctaatggtcatgtataagacgtatgtgcaattggcagacgagtccgcgttcggaagcaacgtgctacactactgcgaacagtttatcacgggcgcgtttgaactgtttgggctgggtagccggattgcggtgctggtgccgcccggttgggaaaacgataatttaagtgtacttttgaaacatttgcacggcctaaacttgattacaatcgacatcgtgcaatagcaacatgtggggcgtcttggtgctggttttgctggccgtgcttttctacctgtggtggagcggcaaactcaattttaactcgctcaacgaatcttcgcccagcttggcgcagagcagcgactcgctgcaggtcgacccggaaacgaatcagcttaacgtcaaacttaacaacactaagctaacgtacatgcgcgtggcgcacggcgacaacaaggttagccaggtgtacgtggcggacaagccactgtccatggacgagatcgtcaagcagggcaacggccgcgtagagactaactgcgtgtttatcggcaccatcttcgatcacggcgtgcgctcgcccaacgcggccgggccatctagcgacgtggccgtaacgcgcacgacggccaattttgacgtaaaagagtacaaaaacatgtttatagttatcaaggggttgacacccggcaaaatgaacaaagaagacaacatgctgtgcttcaccgtagacggactgcacgtgtgcctgatcgacgccaacgcggcgccgctgtccgagcgcgagttgcgcgagctgcgccgttccgcgtgcacgctcgtgtacacgcgcaactcggcggcgcaacagcttttaatcgagaacggttacacggttgtcaacgccgagcacacggcctacctcaagaaccaaaaatcctacagggaattgtaataaaacaaaatgtaattgtgacaaataattatttgatgtttaatgcgatttaaaacggggcacattggtgaccatgtctagcttattgagcgccattgtcaaattaataaacttgcaattgcgctcgtcgtaattgtttttaaacttgtcttttatttgctgcaacaaaattttgtcgtcaaacacaaagctgcgcgcagtgccggcgttgatgttcttggacgcgttgtactgcgtgaacgaaggatgtagaaacgatttgagatgctctttagcgtgcgcgatcatttcttgcatcttttcctcggtcacgcacgcgttagcggcgcgcgctgccggcttaatattgaggatgtagatgagcgcgtacatggggctgttgttaacgctaaggcgcgtcaagttgtgctggtgcacggggtcgtggtccagtagcgtcttgtacggcacaagcccggtctgcggttcgcgccggtagcgcaccacgtgcgccagaaacacgcgcaccgaatccttgagcgcgtctaccagcatgggctcctgcgggtactgtttggtcaaaacgtggtcgtacaccgaaccggaaaaatgcacatgcggcaaaaatttgtggtccgtgtacacgatgaggaagcggttttgtacgccgtcgtcgtagtcgtccacgtacagcgggttgttgtttacaatcagcattttgtaattggcctcgtatttaagcaggccctggtacttgcggcttttggtgtcacatttgcttgagtccgcgtgttttttaaaaaaactttcgctgcatttttttagctcgttaatggtgtacagttgcgagttgagcttgcttacctccttgtcgctagtttctctggattcgccagtgtgcgtttcgtcgtcaaatttgtgcattagcaccaaaaaatcgagcagctcaaaaaacgtcgatttgccggacagaggcacgcccggcaggtacaccgccttgcgcccgtaatcggtgggcgccgacaggctggccgcaaagtgcatgagcatgttagagctggcgtggttaaagttggtgtagcgcttgaaatagaggtagccctccacgacgctcgtcaaatagcccgtagaatagtcgcgcaggttcattttggacagaattacgcgcatgtaaaaccgcgtcagccagctggacagtgtgtccgagtcgcgcgctaaaatggttttgtcccaccacaagtttttgtacttgtacaaaatgttggaggtgtcggcgtagtgcgagtaaaattttccaacgacaagcggttccgagggcgccggctcgttcatcacctcgagctgcaagttaattatgaacgttttgaggtcgcaacattccgccataaaagtgtctacaaactcgattttgtgcagcttgcggtgcagcacggctgcaattttaacgtgatctttggcaaaaaactgcgcgtaagtgtgcagcagctcgctgtccgtcaaaatcaacgccgtagacaagtacgccttgttggtgccgaaaacgagcatccacatgagctgcgacaactcggggtcgttcacaaacaggtcgatgatgaggcacaccttgagcgctagtcggtcaactttgattttgcacacacaacggcacttggtttcgcgtccgccgcggcacgggctgcacttgaaattgtgcaccacgtcttccactttggccttgttaacgtacaaagccagcgtaaccaggcttttgtcgtcgaaattccacaactcgcgaaacaggtcattaagttgcaaacgtgattccatctggcacgacgcgcagttgcccagcaggttggtcgtgcgtaggtttgccctgaccatctttacgtcgcggcatagcttggctacgtggtacgtgcgcaaaatgtcgcgctcttctgcgctggtggttagcatgtacgcaaacacatcttcgggcaggtacggcgggtcgtcagggcgtttgaacgtgcccggcatagtggttcccagcaaaaaggggcagttggagtaaaattcgtccgtgatcacgttgtaaacgccatacttggtgtggtacatgtatttccagttattaaacttgatgttttgcagtttgtacgggttgttattaaatagcttgtacaaatcgtcgtcttttttgacaatctggtagtgctcaccgttaaaaatgagcgtcacctgcgtaactacgttttccaccttgataaaaaacgcttggcctagcaccaacaatggaacctcgcactccatagcgtttttgtatgtaaacgcccacgggtcgtcgcattcgtgcgcgtcgcttgaactaaacttcaagtagataaaataatgcgcgccgtaatacgaacctagcataacgtacgggtttacgcccttgaagcagtgccagtggtcgcacaggttgttaaagattgcaacgccgcgcgtggtgaatgggcgacagcgttccaaagccgttgttaacgcatccttgtcggtctcaaacagcgtctcgcataccagttcaaaaaacaacttggcgtcggtgtcccgaaagcttttcttgtcgtgcttcgtaatctgcttccaaatgacaaacagcaaaaagtgaaaatttttgtagttactgtcttcaaaatagcgctgcagtaaatcggcgtcgtcggcgcggttgtcagaggccaacactttaaccatgccctcgcgaactttcgccaaggccttgtcgatttcgccttgaatggcttccgcgttttcgctgctggccgagattatgggcgtcgcaacgggcggcgcgcgtaccgcgccgccgcccacggccgctgcgttttcgtgtgaaaattcgcgcaatttggtcaaattgacgttgataatgtgccggtacttgggcgtggtaatgcattctgccaggttaatgttgtcacgaatcacgtgaaacaagtttttgttcgaattcaccaaattggggaccatcttgcacgttgccgtggcaccgttggccatttttatctcaaacaagtcttcgctcttgtcaaacgcggacttgccgtttacaaacagcttaacgggcggactttcgtcggtacacaagctcatttccacgctgagaaacgttttggggttaaacacaaacaggtccaccggacccaaactccggttgtgcacaatggggattgttgagtccacgctaatgccaaattgcacgtacaaaaacagtcgccagccggtaaaagacacggcctgcgatgcgggccaattgggccagtagcagtagtcgccagcctgcgcgcacatgtttgtgtgcgcagggttttcgctgtagaaaaaccgctccagcttaaggtaatccttgattttgttgtaatgttcctttaacaaaaagggttttacaaaaacacaaaaatcgttattctccagcacgagcgagtgcccgacgcagctcacgcgcctttccagcaaagccttttcttcgtcctcgtcgcgcgccgcgcgtgcgtgcgccgcgcacgcgccggccgcgtcgttcttcattgtgtttaagagttggcgaaagttgctcacgtgctccagcaatctgcgcgtgcctgtgttcgtgtccctgataattaaccggttggcgtcccgcaaattgttggcggcgtactcctcatcgtcagttacgtctttaaacagctgcggcaaaatgttctccataatggtggcgatagctttgctagtggcgttgtttatgtacgttgcggtgtcgatacgtgaccaccacccattcctgcacagaatccaaacgctgctgcgtgacttcgacaacacgttgctgtacggtacacacgtgcaaatttacgatctcagcacacccgctcgcaccgagcgactgtttattattgcgcccgaaaacgtcgtgctgtacaattttgataaaacgctctattattatctggactcagccaacgtgttttgtcctaacgagtacactgtggccaaattcacgggcgcgaccatccgcacggtcaacgacacgggcgtgtactcgacggtatgcacgtctgtgagcagcttgacgctggttgagcactttgtcgggctcaaaaacaacacgccagaccacacaatcgtgctggacgccgccgagcagattcagtttacaatcatggacgtcatcaactatttgatctacaacgggtacgtggacatcgggcccgcctagtttggccgcaaccgccgcccgcgttgcacgcagtttaaatttaattaaaatggcattgtccaaaattgattttgtaaacgggccgctcgaggtgttcaccgtgcaagacgtcggtcgggagaattggatggtggctaacccgtttgccgaaacattgaagtattcaaaaccaaataaagctattgtgcaacacgtgtctaaacaaaatcaaaaaactttagaggagctacgatcgaaccgttgcggtacgattgcgtcatcgctgcacccccaaactaaattcataaacaccgccggcgtgtttgagttgataaacgcttcgggaatgcctgcggctaaaaaatttaaacagtggaacactaacgacctgctgcccacgctgtgtcaagaaggcgaatacagtatggtggtcgacgccccgcccaaaatcgccgaaggtatgaacgccgtgcacgttgccaccaacgaaggccaagaagcgccgtgggcaaaggatttagagttttataaagtttctttggccgaaaaggacaaaatcattgccattaaaactaacgaaaatcaacagttggcaacggctttgcaaaccgccaatcaaaatttaatggacgccaacaaaaatttaatgaccgcgtttacttttgttaacgaagcgcgcaaagacagtgaggccgctcgccgcgaaacggcgcagctggccaaccgcatggccgacatcgcgcaggacgtgatcgccaagccgagcaacccccaactgtgccacagcctggccgtgtgtgagctgggcaacaacgagtttgcgtttctgcgtccgcaaaagcgttcgatgcgacgcagcctgcgacgtctcggttccagcgacgtcatatttagcagcgactacgtgcccaactcgatgaacgtgctgaacaaggtgaaggagtccattccgcgcgacaaatttaaggccaggcacaacaagataacgctgctggaaaactacaccaaggagcagctgatggacgtgattaattgcacaatgaccgagcggcaaattgcgcgtttgggcaatatgcgaaatttacaataaataaaatatttactttattttacttttttatttgaaacgtacaagctgtcgtactcggcgaggttgtcgagaatttcgtcctggtagcgccgccagtcgcgcacgggcacggggcagcgctttacgcgcacgtagtagtcgtacgcaaagttgttgctggggaggtcgtcgaccagcgtgatcgacttaaaataattgacgcctttgtcggccaaaattttaatcaccaccttgggcgacttgggcagttcggcgcccgattctgcgtgcatgtcaaacgaaaagttggaggaaacgtagcggctctgcatttgcaagtccgtcgtctcggtcgtcgcggcgggcgcgtcctcggcgaccgacccctcgctgatgattgcgtcgaaatacggcgtcagctggaccgcgcgcagcgagtgcgccacgtgatcgcggctgccgtaggaccacagcaccaacacgcagcccgcgtcgcgcagctcttccaaacaatcgtagacgtgcggatcgcgaatttgcacttgctcctgttcggtgataagtgtgctgtcgagatcaaacacgatcacgtgtggaaagccccacacaagcgcatcgcatttgagctgcggcacctcaaagtcgggcagcgcgtaccactcgtcgaggaacgcgtacatggccggtttattgtgcagcacgcacacgtgccccagcgcaggcgtcttgaacgtcgccttgatgtggtgccgcacgctgcgcatgtcgtcttcggcgacaaacacttgcacacaataccgcggattggcttccagaacgtgcagctgcgcgccgccgcgtacttgaagtagcacgtattcaaagtgttcgtatttttcaaagcccagatacttgagatcggtgtactcggccacggccaaaatatggccgcggtaaaaggcgttgcgcaaccgcaaacacgcccacttgcacttcatgggggtcagtggacgccgcgcgccttattcacggtgtttgcggagtttcgcgccagcaaggactacgcgcagctgattcgttttttgactaccaactttgcgtgctacgtgaaaaacaaaacgttcaactttgcaaacaccggccacttgtttcattcgctgtacgcgtacgtgcccaatgttagcgagctagtgaaggagcgcaagcaaattcggctgcaagtggactgtgttacgcgcctgttaagcagcaccaccaacgattttaaaatgtacgtagagctgttcgagcatgtcgacgccgccgtcgattgtccctgcttgttgttgcagcgcagcatggccaacgccaaaaactacgtcgatggacttaattgcaaacggtttgacattaaaccccccaagttcaaaaaagagccttttgacgccattttgtgcaaatactcactaaactacaaaagtctgctgttaaagaggaaagaaaaacgcaccgtaagcgcttccaagcgacagaaaaaaataaaacgccgccagttactaaacgacaaagtgatttatttggttgacaaaaagcgttttgaggattgtgcgttgctgcggccaagcgggctaagcctcaaaccctgccggcacaaattcgtggttgcggaaaaccagacgcgcgctggcgacgaaatggtgtcctttatccaatactgcgagcggtgtcgcatgcgcgttaactagtagtgacgccggcggtagcccatgcggcgcgtgggtgaccggctgcgccgatacgtgcgcggcctgcccgggcggcgtctgtacccggagctgcggctgcggctgcggtttacgtagttgctgtttgcggagcgggagcggcggcgcacgtatgtgccgtttgcagagcgggagcgggagcggcggcggcgcacgtatgtgccgtttgcagagcgggagcggcggcggtagaccatgatgcgcgtcaatgtagctttgattttcaccttactattattttttgcgctttgcgggcgcgcccaaataaatatctagctcgtcattgtcctcggctgttttatttaaatgccttttgacgctttcggcacccttgaatattttgttgtagtcctcgatgttaaacttgcagttggccaccgcgtagttttccatagttgtgtaaaacatggagttggccgcgttgtagtacattctagacagcgggtaagggtccaggtgcttaagcagtttgttaaggaactccgcgtcgtcacaaaacggaatctctgtgccgcttgtgacgtactgctgcggctgcagccgctggatgttgtcgccgcgctccaccaacagctcctcaagcgtggtgcgtttgtcgcggctaatggtttcgccttgcaacaacacaatcttggcgtagcgcagcacggggctggcaaagcagcgcgcaaacgaaccgcgcatcacgtccacagtggtcatgtctaccgtggtagacggcatctccagcaacgtgcgtaacgtgtccagcagcgtgttcgtttgcgcttccgttatctgcggccggcatgccaagtcctcaaacgcagactcgagcaatttaaacagtgggtggtaacgctcggaacgttccaaaatcatggccatgaccacgtcacgcaccttgaactcggtcgacgaggttgtgttaagcgtgtaatgctgaatgagcttgcgcgccgccgcgcggtagcgccgcatgtccacgagcgcgggcggcggcgcggcagaagcgggcgcaaaggcgttaaacacggtttgcgcaagcggcggcgaggcgccggcggccggcgcgcccgaggctgggccgctgccggccgcaaattgcgacgccatggcggcgttggtgttggcaaacgcggtttgcgatttgcgcgcaacggtaatcaaaaaggttattagagcgtcggtgctaaggtcgagttcgggcaccgtgtcgctgcacatgcgcagcagctgcggccaaatttccatttgcatgttttcgtcaaaaaggcgccgcaggctatcgatgcgaatgtgcacgtcggtcacgctcatggcggcggagcgtcgagcacctctagccggttactgtagacgtcgttaagaaactgcagcacgttgaccgtatcttcccgattcaacttaattgtgggcgcgctcgcctgcagcgagtctaccaacttgcgcgccgcaatggactggctgcccaacgtagtaaggctggcgattttgttttcagacgcatcgttcaatataaacgctgctgccgtgcgcgcgccgttcatgctgcgcaacatttccgcggcaacttccggttgcggcggcggtaggcgcgccgttcgcgcggcgcgccgcggccgttccgcgtcgtcgtagcccagggaatcaatcatggttgaggttcatcaacaacgcaatttcgttgtcaagcttgtaatcggtgatgatgcgccttataaacgtttccggcacaatgcgttcggtcatgagtgcatgcaaaatctcaattttaattagcttaattttgcgcactaactcgtctacgttctcgtccgagtacttgttcataataaaacggcacacattacgcatttccaattcgccggcgggaagcactttgttaggcacgctttccaaataatggcgcaggtaaaacccgattagcacagtagacgctatcttgtttacctttttaatcttcgtgtgatgacccatttttatcataaaacttctaaacggtgtaagcaatcgttcgccgttagcgacagtggagctgccgttacactgcgcgtttaggatgctcaacaaacggtgctggtcctcgtggcgcaacagcccaataacgcgccggcagtcttttacaagcggctcgcacattttgtgcttggtgtacaacgcgtacgctttatcacacaacaaattgtaaaaaaattgcacaaatatttgcgtcatgaggttgttttcgttaatcacgtccgcctcggggccaaaatcagtttttagaatcacatacagcagcagcgggatgccgaacatgggcctcaaaaaaatgtcccacccgtcctgcagccccgcgtcaagcgtaaacagcgcacacgacaagtagctgcacttgcactgtaaacaagaaattttgcccgcggcgcgacagtgttcggcgcacataagtgcgtgtgcgtccggcgcggctacgggattgtaatacactttaagatactccataatggttttaaaattaggcacttgtttgatgaactcgtcgcgcaaaaacatggacattatgctcttgatgttgtgcaggtcctccgaactaggctggctttcaaagcgcgctttaatggctacaatgcatttgttaaattccgtaaaaaaagtaaggccttgcacgtcgacaagctcgtgctggtcgaagtatttggcgagcaaaaaagtaagggaatcgatttcgtgctgaagcaattgcgcttcaaagcgcacttgttcaaagctgtgccccgacgggtgcacagcgttgaaccgcaagttgtacgtcaatttgtaagtgcacatgtcgcattcgatataaccttataatggacgaacgcaattcgctgctgattgccagtttgacgggccagatcttgacacgcgacccgccggcggtgcaggcggtgctgcacacgcctgagcgttcgctcgaccaaaaattggacgcgctggcagacctaatcggagccgtgagcgcggcgcaaaccgctgaggtgcgagccaacagcgcgctggtggcgcagaataacatcctgcgtcagcgggccgcgcaaacggccgtcacgtttttgcggcgagctcggcaagtgggcgtccctgcatcggcgcttgaccaaatacaaagcgcgctgcagcagtacgaaacgtacgtaaacaacgacgggctggacggcaccgtcatagacggctacttgtcccgcgccgaggccgcgtatgccgacgtgcgcggcgccaacgttgtgccgtttctcaaaagggccgaatcgcaaacgcaggctgccgcgccgactgtggcgccgcctgcgcagctgtacgcgctaatcgcaaaattcagagatccccgggccatcgaacgcgtcggcaacgcagacatccaaagcgcgctgacgcacatgacgcagaacgttgagggtgcgccgctgataccagtgcgcatttaccgcgcgtcgctagacacaataaaagacgaggacgcgcgtttgttgtttgatttatatttgcaacaagacggcattagttacgaggaggacgctcaagcggcgctcgaccggatactaggcccgtacggcgccgcgttcagcaacgaaagcgaagcggtaatcgccgccgaacgcgactttgaccgcatggacatcgagcaattaaccgagtatatcaagcacaactacagcgggcaatttgactttaatatgcacaacagcgtcaacgacgtacgcgagtttgcaaaaaccgtgtggcgcgctaacaaaacgccgatgccggagcagagctggcagacgccggcgcccacgccaatgccggagcgaagttggcagacgccggcgcccacgccgatgccggagcagagctggcagacgccggcgcccacgccaatgccggagcgaagctggcagacgccggcgcccacgccaatgccggagcgaagctggcagacgccggcgcccacgccgatgccggagcagagctggcagacgccggcgcccacgccaatgccggagcgaagctggcagacgccggcgcaagaccaaaatttgcaggcgcccgtgccaaacgccgatgcaaaacgccgtcgcgtgccgtcgtcggacgaggaagaggtcgaggtcgattttgaggccgaacgaaagcggcgtcgccaggaagacaaagattttctgcgcgtcaaggccaaagagctggctcaatacgccggcgtcaacgagcgcatggagaggattgtgaaagtgaccagggccatgcagcggacgtatgactattgtaactgcaaaaacacgatcaaaggtacgcctgacgcggccacgttcgaaaaactgttgcagcgcctcaacacatacgaccttgcccacgttgaaatgacggttaacttttacgagctgctgtatccgctcacgctgtacaacgatgaggacaaccgcattgccggctacatattcgctgcggccaactactttcaaaactgcgccaagaactttggccaaatgcgcgcccagtttaacgcgcacggtgcgtttgcccaaatagattcaatggtcatgtttgtgatcaaatttaattttttgtgtgatttgcaagccttttttggccagattgacaatttgcctacactgggccagcccaatataaaaacgcacaacgtgctgattatgcgcgacaaaatagtcaaactggctttcaacgcgttgcaatacaacacggtagttaaaacggaaaatcggcgcgatcccaagcacttgcggcgcgttattatgcttatgaacgccgattttaacgtaatttaacaagttaattatattacatatttaaaataaaatacaatttaaattacaattaatttatttgtattatgttaacattaaaatttattgtttaacattgttacacacgtcgacgcaatatgcagcgtacaaagctttgtagtctttgtggtcaaaattgaagcgttctctatacaaataatacaacttgttaaacagttgtttttcgtcgcacgacttacattcaaattttgtatagcaatggcgcagtaaatccgtaaaatttaatttaccgtcgaccgcacattctttgtttaactcgtcacagttcaaagcgtcaaagggacccgactcaatttgcaatttgtttagatctttgtaatttgattttagtttataaattaatttaccgcaacgaataatgtacccttcaagagggcttttcggaaacatttgagaattaaaatgtaaaccttttacaaactcgttatacaaacactggcgaaaggggatcgtgtcaaagcccgcggcccgtaaccgcaactgcgcctcttcaaaaggcacaaacgcgccgttcccaaattgaatttcgtaggcgtaatattttaggctttccttttgttgcgtgtacgcgatcttgttaataggcttggtgcgcgcttcgtcccgccaccccagcagctctccgtacaccacaaacgactcgtcgggcgccatcagcggcttgagctttaaagcgtacgcctccaactgcgcgctaatacggtgcacgttcataaacgccacgtctggccgataagtgttgcgcgacccgtacgtgacaacgcctttatcgacaatcaccctgtagttgcaaccgtccaacttttcttgcaccaaaatgcgcttgttggccagcacgctttttttctgccggtccaagtgcgagatggacgggtaaatctggcacaatatgttgttttcgtcctccggcatgacgggcccgcgttcgttgagcgcgtacatcacgatgctgtgcagcacgtcggcgcgccgcggcggctcgggcacgtgcgccagccgctcgctgagctcgcgcagccaatttttaaaaaagtcgcgccactcctcgcggcactcgccgcgctgcacgagctgcgcgtacacgcgcagcttgtccacgtttttgatcgtaattgttaacttgtcgtcaatcttggttgtaatacctttggaaatcgacaccacgcgcccgttgactagcagccggtcggcgccgtccgttgccaaatccacaaaatcgtccaagtttagcaacatgtttaaaattttggttgagtcgggcaattttttaaagtcaaggtaatattcggtaaaagtgcaatcaaacataagccgcaacaaggccttggcggtagttggcacgttaggcctaatcatgcgtttgacaatttttacaatacacactattgttaactttttgataaactggtacagctgctcgttcagctggccatatttgtctttgcagtcgtcgggcttgagaaaaatgcccagttcgggcgtcttgccgctaaacacgccgtacagtgccacacacaagtccgtgacgcgcacgtcgttgcccgcgtcgtccttcatgtgctcgcatttcaactcatgtttgttaaacacgaactcttcaaaaacctcgcggtcgcattttttgtacacaaaatagtcaaaatcgctgtcgctgttggcgtagcctttggcgcggctgcccgtgtcaatcttgatgtacaccatggcggtggccaagctcgactgcgatcgtgatcaaattcgtgcagcatttatacggcgcaaatccgcaatttaatagcaatgattcattttaatgacaaaacatattgcgcacaagtatatttttagcgcgcaatcaaattacaatacgtatataataacgaacgcgacggcctgtgcgcagtgtacaccaaaccatgatgttgcacgtttctcaaatacttgcgtccggagcgccgttgccgtttaaaattaaaattaaacgctacgatgaccatgaattgatggtgctcaattacgagtcgtttgaacgcgagcgcacccaccccgcggtggtggaatgccgcggtctcattttgcacttgcgctcctacgacgtagtgtcgcgctcgtttgaccggttcttcaactttcaagagctgttgcacacggacgcggcggcgcaccagcggctgttttcggccaatgaagcgtttaaattttacgaaaaaatcgacggcagtttagtgaaattgtactaccacaacgacaagtggcatgctagcacgcgcggcagcgcttttgcggaaaacctttgcgcgacgggtgtcacttttaaacacttgatattgcaagcgctgcaaacggacacggaagacctgtttcaatcgctgtgtgagctccatttaaaccgcgcttacacgcacatgttcgagctgaccagcgggttcaaccgagtggtgaccgtgtacgaccacgaagcggcgctgtggtacttggctagcagacacaacgtcacgggcgattacgcgcattttgcccatttgccgctgtgcaagtatccccagtgttacgaatttacaaacgttttgcaatgtgtaaaacgcgcttccaagctgcaaaacttggaggaagggtttgtagtatatggcgcgaacggcgcgccgttgtgcaaaattaaaagcgagcaatatttgttaatgcacaaaagtcaggcgcgcacgcagagccccgccaaattggcgcaacttgtgttgaacggtaaacacgatgactttttagcgcaatttccccatttgaaacagtttgtggaaccgtacgttgtggccagaaacctgtttacaaaccaagatactgttaacacaatggacgtgggattaactttaaaccaacaacaatttaacgatctaatacgcgatttgccgtggcgccatttggcgtaccggtgtcgcaaagcgcaaacaactgacgtagaaaacgaatttgtaaaattgactgagccggaacaaattcgcatgattaaaaacattgtgtgcccgaagcccgccacagtaaaaaccgacgcgccgcgcaagagacaattgctagtgctggtgggggtgtccggttccggaaaaagcacgtacgctaaaaaactaaaaacgcacgtcgaaatcaaccgcgacgacatgcgcgtaaaaatgtttttgggtggcgactacactaaattaaacgcgttctacagccaaccgcgcaattgccgccaaattaaagaaaatgcggtaacgagcgcgtgcgtgcagaggtttaaagacgcggctcgcgacgaacgcagcgtggtggtgagcgatacaaatttgagcccgctagcgaccaaaatttggcaaaaattagccaccgagcaccaatacgagtacacagttaaatttatggacgtgccgctggaaactgccattagacgcaattttgcgcggtcggacaagtttcccgtcgacccagaaactattaaacggcagtacaaaatgtatttaactttggttggctttgaatgctacacgccgccgggcgaagggtttccaagcgccgtgctttgcgacctggacggcacagtggccgtgcccacaaaccgttctttttacgactttgatgagcgcgttttgcaggacgcgccgcgcgcaaacgtcatagcgtgcgtgaaacacttggcagccagccacgacgccgttgtcgtgtttataagcggccgcagcgccgcgtgtgaactcgccacgcgccaatggatagacatccacgtcgccccgaacgcatacgagctgcttatgcggccgctaaacgaccactccaaagatagtttgttaaaactgaagctgttcgacgagcacgtgcgtaggcggtttaacgttgtggctgtatttgacgaccgcccgtgcgtggtgcgcacctggcaagaccttaaaatacccattgtgttcaatgtttgtttagactatttagaattctaattgtaaatataatgcgtgtaataaaatgaaaataaatttttggtgttttattattgttaagacactgttggtgtaaccgttcagcccgatggacgccaattacaaggtcatcgacgttgacacgtttgcccgccaattgattaccgacaaatgcagcgaactgatagaaaccgaaaacctgttgccaggcaacattctgcacattgtaaaacaagcgcgggacaaatactttgaggacccttcacctaaaaattatgagtatgttaaaaaactattcctgcgcacaaagtacatggacgattctatagactacaaaaactttaatagacgcgtgctgttaatcgtgttcaagtttgcgctcaatcgaggctccggttattttccctcgtacaaagaattaatcgaggtcgccgtcaagagactcaacaaaatcaatccggatttaaaaagctcaccgcgcgctatgctgcaacattacaacgaatgtctagaaaatttagacagccccatttcggacgagcaccatttgatcacattcggcaaagaagtggctaccaaaatatttatcgaggcctttgagttcagctacgcgaccaccaatgaaatccagctggccaccggcccgcccgacgccgacgcgttccacgccgccacaacggcgtttcaagcgtcgacacgtccgacgccctgtttgctaggcgacgtgatgaacgagcgcaagcgcaagttgcaagattccgaaacgccgcagccaaaaagagccaaactagcaaccgtcacactaaacgcggcgccggcggcgcaggcgctaccagcgccgcaaaaaccgctctttgtgctatagcgcctaaacacgtttttcggaaacggccatgcttgaaaaacaagactgcgcattaatgtcattggccgatcagcgttaacgcactctgctttatacaattgtgttagatccggcatagcgctggcgcaccacttaaaatagaacgtgcttttcaagaacagccgtttccgaaaagcaagattgcgcggtcaatgccccaatgacgcattgttacaaatagcacgcgtttttcgcggacggtcgtagccaaaaagcaagatagttgcctgttaggcgacgttcggtttggcgccgtaatttttcaccagcgcctgtttatactgaacccgcgcggtctgctccgcgtacgcgttggtcatgatgacgatcagcaacgtaaagaacaacagaatcattactaccaccaaaaacccgcagagtaccaggacaaattctttaattaaagaccggttgcgcgccacaaactggcttaactgatcaccgtccgtgggcgacgcgttgttgcgcaggacgtcgacgatgggattgccggcgcggccgccggtcaggcgcgacaccacgtgggacggcgtgaccatgcttacaaaaagtaattgtagcgcacggcgtgcacggtcacgccgcttgaaaaaagcccgtgcacggccacgcggttggctacccgctttaaagccgtgacctcgtcaaaatcggaattgtcaaacacgttcaaagggttgatatcgggcatgttaacgggcacgctgccgcgcattgtgatggccacgctgtcatttttgcagaaaacgcgcacgcgttcgtgcccaatcggctccgcgccggacttcacgttaagcgagttaagctttacgattacgacgggcacgacttggtacggaaaaataagcgtctggaaagtgcgcacaaactcgacaattgtttggctgcactcggcgatgtgcaacagcgtttgcgcgtctttaacgtactgcaggctggcgcggtttaccgtcgcgcagttggacggaatgtcgccgcgcagcaggcgccgcgtgcgctcccaattgagtttattgtataggctgtcgatctcctcgtgcggcaaattaattacgtaacacgccggcagcttgcggtattggaaaatgcagaagacgcgcttcaaactcagtatctttaccatggtgggcgtttctaggttgaagcacagcaaaaacttgtcgctttccgacagctctttgaggtgcgctaacggcaactcgcagttgatgggccttagctcgctgtagtttataggcagcgcaagcgcgcgcatgtccaccaattttttgcccttcatgatggctttgcacgctggctgcatgtttaagccggggtacgtaaactctacgggacacgtggggttgtcgtggtgcacaatcatggtgttgcaataaaacaggttgttggtcagcagcacgctgaacacgcgcgtttcgccggcgcctatttccgtaatgggcaccagcgggttccaatacaccacggtggcgccacccgtttttttcggttgctgactgttaccgctgtaatcaatttcgtgtttgtacaccagcacagaggtgaaccgcggaaagttgcgcttctctacatacagcacgtccgcatccgtgggtacgtacacgatcaggctgtccgtcgggcggttaccgacatcactttgaggttccaccaaattatagggaaacgcaaaaaaacggtcgcttacacagactttgatttgaaacgggcactccatggcggcgtacaagtaagccttatgagtatgatttgggcgcttctcttcgcgatcgtggccgctttaatttgggcggcgctccacgcgcactaccccacggaggactacgactacacgcagcgctgttttcagcccggcatgtttggcaacgtcccaagcgcgtattgcaacaaatactatttatgcgccggcggcacggccattccgcagttttgcccagcagggtttggtttcgacgaaactgttggccagtgcgtgaacctcgccaatatggattgccgcggcaaaccactactttagctggtgcacccggaccgtgcgcagcagcgcggcgggaatgtaattgtactggtagaacaaatcgcggcgcacgcgctcgttgtttataatgataagcacgcaaaagtagacagcgtacaaaaagactattatgaggaaggtggcggacaaaaagtatttcatgatgcacgcttagctgaataaaagacaattaaatgtttaacgttatttgatttattttccttgttgtaatcctttgtacaaaattgtcgttcgtgataaccaggcgcgctttctcgacacataagtttgcgaataaacgtaacgctttcatacgtggcgttggacacgttgccgctgtgcagtgtggtgggtgcaagaggcttgcgcgcgccgttgtaaaactggtgcaccgtatacgagtccatgttgcagaatgtgacaccaacgcattacacggcgtttttgtagttgccagtacgctagtgtattccgttcaataacgcgtttttcgcagcgttttcaattggaggtttaggcccatgtacaagtgttgcataactgccgccttttgcgccggcgttatatgttggttgttttcaagcgaatacatgtaaaagtcgttgagcaacgttaaatcctcgtcccaatcgtattctaatttaaattgctgtaatagcgcgtccgcaaacggcacgttcgtcgtcgccataattaacaaactggctcgtattgacctgcttacgtcaaattcagttttgtattcggtgtgctcgctgcggatcgcgctgaacgacgtggccaatgcagtcgttacttgaacgcggcgtccactgtgtcggcgctaaagttgatcgacggttctctttctacgtcgtagttgagcagcgcttcgtacaccttttgcggaggcaaacgacaaacctgttttttcaattccataaacatcctttcgtgcacgttcatcattacgtatttaaggtagcagttggccgcgttggttgcaaacataagaatagcaaaatccaacgcggccattttgtaatcgtgctggtaacccttgtaattgcccacgacacgtagctgcaattttgcgttttttacgtattggcacgcgttgtagtacgcgttaatggtgtttactatgctttctttggcgcctgtgcgcattgtgttcacaaacaaaacgttgcccagttttagctttttttgcgattctaacttgtacaagttgaacataccggcggcaaagttgtccggcagctccgcgttgtacagacaatacggaatgccgttcacctccggaaactgggcacacacgtcggtgtgttgctcgcccgcgttgccaagaaacaatttgttgcgcatcgcgtagcagacctccaaatcgctgggtctgctttgaaacggcgagctgtccacgctgattaaattgggattcatcgtctccccaaaccgcacgtcaggaacgcccacgtgatacacaacgcgcacgtttctgtccaacgaccggtctttgttcttgatcatggccagcacgtttagcaggtatttgctaagcgcgccggcaaacaactcacgattctcgttgtcgggcaagtaccaaacgctgttccgcgacggaagcatggctgtgtagcacagaacgcaggccagctttttgtgggtcacttcaatgttgtccaaacttttaatttgtgatatgtaactgtaatttaacacgctgtctaattccctgtcgtattttgacacaatctcttttttgtcaggcaacaattccagcagccgctttttgagcgcttgcttgggctcgtcactgtagttaaaattgatgagctgaatgttagccgtaagcaaatttagactttttatgtcgcatgtttgtaagtattggtccgcgttgcgggcagcggtcgcaatttgtaatacgttttgcagctcgtcgctaacgtggttataggaaaaaaagcccacaacgctttcggttacgctggcgtttaaaaactgtaattcgttgatcacggcctgttggacaaacgaatacggcaccgcggtcgtggccatggcgcctcttatgtatacacgcgcccgtacaaaccggcgctgtgcgcggggatgcacactggcacggtgcgcgccagcgccgtctgccgaaacagcagccgctcgtagccggcggcgcaagtgcacgcgtcgggcgaaaacggcgttgtgtccaggctaaaccgcagagcgccggcgtcgcagaggtacggccgcggcgtgcccgtgtcgtccaccaagtcacggtacgtgctaacgcaagtctgcgcgaccacaaagtccccgccggccgcgtagatgcgcagcaggcccagcgccgggtcgcaatcggccccggcgtccggcgcctgcgcttccgccagcgcgttggtggcgctgcaaaaccccgcctcgcaagataacccgctcgctgcgctggcaattacgcagatgtcgcggcactgttggtccgtcacgcacggcagttgggacagcgcgcaatccacgccccgcgcgcgctggaactcaaagtgcatcggcggcgcggacgccgcctgccgcgcgtccgccgcgtcctcgcccataaaacgctggacaaatccaaacgtaaacacgtacactattacgacaacggcaattaaaaacagcagctgccacacggacggcatacttaattgtttaaagccgggcgcagcatgtcgtgtgcagaaagctccgaagacactcccgtggaaaagctaatagtcagcatcgaaaaacagctcaaggtaaaagatgaccagctgcgcaaggccaacgagttgctggaccggtacgtcaacatgctggaaaacaaagacaagcgtatccaggaattgtttgaaagcctaatggaaatgaccgaccgcgccgtgcagtatcccgccaagagtcaccaaacacctatgctgtgcgtggcgcgcgagtttaactgcgtgcgcgccattacaggacaaaaagtgcacgtggctaaaatgaagcgcgaactggcgggcgcggccgaggtagtcattgattctgtgcggcccaacccacaagtggattttaacaacatcgtcaattgcgtggaagccgagttcggtgaccgagtgcgcgcccgcaacaagcgtagcttggtgttcgaaaccgaagatgacgccatcgcagtggcagccatgtgcaaatcgctattggccaaaaggggtcgggtttgcgacaagtcgcgtatataacgcgccgccaattcagttccgcagctgtcatgtttcttacggccagcgtattgtacgtgccggacgcatacgtgtcgctgacacagtactttgttgtaacgcaggtaacgtgttgcaccggggaacgtttggcgttggtgctggtagacaagcccatcattgacgaccgtttaaaggtgttggaaagcgcggactacaccccgcataacattgagttgctgtggtataagataggcgaaattgccgactcgtacaataaatattgctccacatagataattgtttcatttgtccatgcaatggcaaccaaacgcaagctcttgagggatgcgctaattaaaaggttgtgttgcaaatcgccgcaaacattatacgagttggccaagcgcaagctgctgcgcagcgacgcgtttgaggcgcggttttcagaaaacatcgaagcaatgcccacggcaatcaagcgcgacgtgctggcagcgctgtttagcggcgcgcggccgcgcaccgccggcgacgagctgcccgagtggcaagaagtgacccctgccgttttgaagcggctgctgtttagcgaggaccacaattttgccggcgaggacgggcgcgccgagtttgtgtggaagctgcattgcgctggctgcgggcgcgccgccggcgcacggcgcgcgcttttaacggtaacggagtgcgaagaatgtggtaaccacattgaacacgaccacccgcgcttggaaaacgacgagttgcacgaattggtgtttgattttgccaattggtgccagaactgttgcgtgtgcccactgttcgacattcggtacaccgaggacgaaaacggctgtgtgcaatgcgccatggaggaagaaggttacagcagcgagtttgctgaacggctgtgtgccaagtacaacctggcgcctgtcttcaatcgctgcggcgtgcgcggcatcgagcaattaatcgaaagcggcattgaaaaattaactgaaaataaagtttttacatttgaataaaatatgtaaacgtacgttgttttttatttatcgtaagcaaaatgtattggctggttataattattgttttattgctagtggttctagcggcggcgttcatgtacgtcaatctcatcgatgcgcaccacgacgatgcgcgctaccccataaccatgtttgacacgagcgacgtgccgctgctggcgcctcccggcgagctcgttatcgagggtaacgcgcacgagtgtcaccgcgcactgacgccctgcgccacgcacgcggattgcaacgcgtgccgcgagggactggccaactgccaactgtttgacgaagacacggtagtgcagatgcgcgacgcggatggcaacgagcaagccgctaccatccgcgcgggcgagtcgtactgctttgctctagaccgcgagcgcgcacgctcgtgcaatcccagcacgggcgtgtggctgctggccgaaaccaaaacgggctttgcgctgctgtgcagctgtttgcggcccgggttggtgacacagcttagcatgtacgaggattgcaacgtgccggttggctgcgcgccacacggacgcgtcgcagacgtggcctccggtgacctgcgttgtgtgtgcgacgagggctacgtgagcgactacgacgccgccaccgaaacgccctactgccgaccgcgcacggtgcgcgacgtgctgtttgacgaggctttttttccgcgagcgccgtgcgccgacggacaggtgcgcctggaccaccccgcgctcaacgattactaccggcgttacttccgaatagaagacatttgcgtggtggatccctgctctgtggaccctgtcagcgggcggcgcacggctggccgcctgttccaccacacgaccgccgatgggcgcgaggtctgcgggtgcaattgcccggccagcgaggggttactgcccgtgtttaaccggcatgccgccgactcgggcatggtgcgccgcggcgaccgcaccgtggccaacgcgtgcctgcagccgttcagcgtgcacatgctcgcgctgcagcacgtcgactacaaattcttttgggcgcgccccgaccacgacgaggtggcggacgcggacgtagtgttccaggccaccgccgcgcaactcagcgacgaacgttaccgcgcgctgctatacccgctgtttagctcgcacccggacgtgacggaaataacgctggcgggcaccggcgtgcttaaaatatccgtgtcgtttgataccgtgcttaagagcacgctgctgcccgcgtcgctgtttaggctgtttaaatggaaagagggcggcacctcgcagcccgtgtgttttttcccgggcgcgggccgctgcatcgtggccaactcggacgagtgcatccgccggcacgccggcggccaagtgtggaccgccgagacgttcaccaattcatggtgcgtgctcagccgcgacggcgccgctatcaaaatctggagtcatgccggccgctacccgcgcggtgacgcgcccgccgcgctgcgcctgcgcgggttttttctcaacaacgaccgcgagcgcaacacggtgcgcgtcgtgtccacgggcaccatgaccagcggcgcgcaaattgacgcgctaacgcaaacgcttgagacctattccaattattcggtttaatagcgcgtggcttagccaacgtggttttcgcaaacaaccgtactcgaaaagcgagttcggcgttgacgcaccgccaaaaataaaacaaagcaatcgcgttttacaagtatggccgtacttgtaaagcacggtcggcgctgacgcatttgtaagccgattcgaccatgagcgtggctcaagtggtggaagcgtgcaaactgtatgcaattttgagcggccaggctattttttttcgcgcccgggtgtgcatggacattgcgcttaataatctactaaagttgcgccaacaagttggtgcaatagcgcaagttgtggctataatagacaaaaacgaaataaaatgcttgcggctaatggaagaaataaacacaaaaattaaaaaaagaactttaataaaactatacaaattaaaataaactttcaaacttgcgtaaagcggttgcgctagtaattacaaattttaatgtatatgcagctgcccggtgcattaatcgtacagcatgttttcggccggcttgtctacaaacatgtcgttggtgtacagcttttcatttaattaataaagttgtttgtaataaaacaaaattgttatatgtataaatatgctcggcattcttgcagcctccgctcggcggcattgtaggcgacgcggatgcgcgtcgccggcgcgcccgccaagtgcccggcgtgcgcggcgggcgcggcaagggggtccagcagcgcatttcgcgcaaacgccgcggacaaaatgatgataaaagcgagtatccaggacagtttcatgacgaacgcgggctgtttaatggctgttcgcccggccgcgccttttatagccggcgcgcggccacagataagatgcgcaagtataaaggatttcggcaaattctgcaattcagtgttttcgggcccgcgatcagtataagacgcaacaatgaacctgcttaagtgttgttcgcgatatacgacaacacaatttccggttgatgtcatgtcgtatgttaccgttacgctatgcgcgtttggagccgtcgcgacaagttttctgtccacgactacgactttttccgaactacagttcttgcaatattgggtaataatttcgctgtttctcggtgggatgattaacctgacgctgcttctgcaccagcgcaggaccgaggcgcacgaacttgtgtttgaactaaaaatgctgcacgccatgtattttggcaacgcgctggtgcaccacgcgttgctgcgcacctcgcagagcgccgtgagcaacatgctaatcaacaacctgctgcactgctgcgcgttggggctgctttttgttgagcttatcgtgctgttgggccacacgttgggtacctactcggattaccggtatgccaaaatgtgcttcgtgataatatttttcgtgtttggtgccctggccacagggctgctgggcgccgacggcatggccaccgcgccgctgtgcaacgacctgttaatggcttcgtttttaacgaccgcatacctgctgacggccgtcgtgtgggccgcgcgcaaagaggccgctggtgcggccttgcagcacgttcaaataatgccatttaatgaccctccgccgccttttgcttccgtggaaatggaggattttattaaaacaaaagtataggagcataattataatgtattaaatgtttattatattaaaattaaatgtttattaaataaaacaattatttaaatatatacgtttattattttcccataggagtgacgcttgataattcgcaattgttgccgtccacccactcgacaaactcatcggcgtacttttgtgccagtcgcatcatcatggcgcaatcgttttcggcccggtgaccctcaacgctgccccccacgtgttttttgtacaaatcgaccagcttgtatgactgctttgggcgcgcgccgcgctgccacgggcacagcttgacggtgacggtgcccgatttgctgcgcttcatggtgggcgggccgctgccgtcgaggatggcaaacaacccgtggtacgcgtcggcgcactgcaccgcgcccgcaaacccgttgtccttaaggtgtttgtgcaaaattggaaaatcaaacgcaaacccgttgtaggccaccaagcacaccggcgggctcagcagcgctaaaaatgactcgatcaaagcggccgccctgccgtcaaaccgcggttgaccgcgcagattttccgcattcagttgcgtcaacacgctcgcctggtccgatacgggcacggtgggctcgaaacacaaggtcagtttgttgcaaacgcgcgccgagcccagcaactcttctctggtcacacattgcaagctgagttccgtaatttgggtttggttgttctgaagcttaggcagcccggtcgtctccaaatccaaaaacgcgtaggtcttgattgcagccatggcaaacactgacggtctggccgcgcgagcattctatattaacctgtgcacaaaatcgccgcacgtgtacaccgtaatgttgtcctcgtcaaacaaaacgttgacaatcgcgtccggctgcgcgtcaaactcaaacaccgacgcatcagcaaccaaaacggcatcgctaatccacgcgtcgtcgtcgacgcgcacgcgcgccggacggcaatgacggccgcaacttgcttcgtgttctaacaatgcgcgcgccagccgccaccagccccagcggcgcaccagcacgcggtccgacgcggcgcgaggcgtgttgagcatcaacagcgccgtgttgctcggcacatgtttgttaaaaaaacgctgcgctgcggcgggcgtgttgaaacggcacagttcagctaaatatggctttgccgggtcgtcggcctcaatgtcccaatgtgccgcaaacacgtcgtccgtgtcgtagccgtgtaaaaagtagtacttgtaccaatctgggcgatgcagcgccttgcgccgtgccaaatcggaggcgcccacgacgttcatgtaaagctcaaacggcagcatgctcaatattttatctataacttttaccggtagacgcggcaacatggatattggctggtggcacagcttgcaacgcttggttggtggttccataatgaatggtgttttgtcagattgagtcggcgttttatagcgtgatgccgtaacttctcagtagctcaacggttagagcgtagcacttttcatcgctttagatgttgctaaggttgcaagttcgaatcttgcctgagatagttttttatttttataattcgtcctttactaatgtttgaatattcatggcattaagcagatcgccattgtcagcgtctatttcccaggcaaacaaacctcctaacttgttttgttccacatatcgacctttagctataacagaatcaacactatcatatgaaattaaatcgcctttggttttatcaaaaacgtaggcggcttttgctacgttgtcaaatttaacaatatatttgtttatttcgtttttgatttggcgataatcaacaacgccatcttcccaagtgcccgaaacgggcccgttactacttcccaaaaaatagttatcgttttcgtaatttgacactccagtccagccgcgaccgtacatggccacgcccacaataattttgcgcgggtccacgccttgatttgtgagcaatttaacggcatggtccgtgttgtacagctcgtttgggttccaactcggcgcgtacagtgtagtttggtatcccaaatcaatgtttgaccacgcgcctttaaaatcgtagctcatgagaaatattttgtcgaggaacttttgcgcaacgtcgtattttactacagcaattttgtcgtggccggcactgattgcacttgtcaactcgtacgttttgcccgtttgcagttgcaactcgtctaacatcacgcgcaattcctttaatagaatgttgtacgtgtcagcgtcgcgctctttgttgccgagcgtcgggttggcgcctttaccgcccggaaattcccagtcgatgtccactccgtcgaaaaatttccaaacctgcaaaaattctctgacggagtctacaaacacgcgccgtttttccgcgtcgtgcatgtaatagaacgggtcggacagtgtccagccgccgatagacggcagaattttaaggtgtggattagccagtttggccgccatcaactgaccaaagttgcctttgtagggctcgttccaagcagacacgcccttttgcggtttttgtactgcggcccaagggtcgtgaatagcaactttaaaatctgaacggccctggcaagagcgttgcagcgcttcaaaactaccgggtatggttttaagggcatcgttaaggccgtcgccgccacaaatgggtataaacccgtacaacaaatgtgacaagttgggcagcggcactttgtccaccggaaagttacgaccatacacgccccattccacaaaatacgcagcgatggttttgtcttggcgtcggttaggtttgttattctcccgccaaatgtattccagcggggacagatgaccaccgtccgtgtccgcaactttaactaagacaggttcactcacggagcagccgtcctcatcacacaccttgacgcgcatgctaaactgtccgcttttagtcacatccaccgtggctttcttggcgtcagcgtcgcctttccagacctgtttatcgttaaacaacacgtaggccatgtcaccgacgccaccattccacacgttccaagaaacttgcacactaacatggtttttgcgctgtatcaaattttcgtacgcagtggcgtccggattgactttgacaagcgcgtaattcctgtcggcccagtcaatgaccggcgtgccaggcgacgcgcacgcaaccgtggcggttacccataaaaattttactaaatagtgcaccattttatttatacttataagttataatcatttaatgtaacattatgaacaaaattgtgctgtatttgttagtttatggcgccacgcttggcgcggcatacgacctcttaaaagcgcctagttattttgaggaatttttgcataaatttaataaaaactatagtagcgaatctgaaaaactgcgccgttttaaaatatttcagcataatctagaagagataattaacaaaaaccaaaatgacacttcggctcagtatgaaattaacaagttttcagatttgtcaaaggatgaaactatctcaaagtataccggtttgtcgctgcctcttcaaaagcaaaatttttgcgaggtcgtagttttggaccgcccgcccgataaagggccattagaatttgactggcgccgcctaaacaaagtgactagtgtgaaaaatcaaggcatgtgcggcgcgtgttgggcctttgccacccttggcagtttggaaagccagtttgcaattaaacacgatcaacttataaatttgtcagagcagcaacttatcgactgcgattttgtagacgtaggctgtgacgggggattgctgcacacggcgtacgaggccgtcatgaacatgggcggcatacaagccgaaaatgattatccgtacgaagcaaacaacggcccttgtcgagtaaatgcggccaaatttgtagtcagggtaaaaaaatgctacaggtatgtcacactatttgaagagaaacttaaagacctgctgcgcatcgtgggtccaattcccgtcgccatagacgcatcggacattgtgggttacaaacgtggcatcataagatactgtgaaaaccatgggttaaaccacgcggtgcttttagtgggctacggagttgaaaacggaataccgttttggattttaaaaaacacttggggcgcggactggggagaacagggctattttagagtgcaacaaaacataaacgcttgcggtataaaaaatgaattaccatcaagcgcggaaatctattaaaacaacatttagatataatattttatttttacaatacatttattatatatacataaaaaaaaattaatagttgcggctgcggttgcgtaccatgcaaaataaaaacaaaattacgcccagtatcaagaaagcggtgaatccgtgccctagcataaatgaatagagcgtggcgttaagttcgcccttggccatgtcagcgatgtcgctgaggctggtggtctggccgccaaacttggtgtattccatggtggaaataaggttgcttttttgttgggcgataaacgaccagccgctggcgtccttccagctttcgtgaaagcttgtgttgccaatggtggggatccaaaactcaatgtcgtagtcaatttccagctctctgtaattgttaaagtcaatgcactgcgccgagtccgtgttggacacccaacggccctccctgtagatgctgttgttgtagcagttgctggtgtgcggcggcggattggtgcacggcatgagcagaaacgtgtcgtcggacaagaacgtggacgaaaccgaattgttcatgaggttgccgatgagtcgctcgtctactttggccactgacacgacgaggtcgtgaagcatgttgttgagcttgttaatgtgcgcgtgcagcagctcgaggttcatgcgcagcatgtcgttttcgtacatgagctcctcctggatgtgcatcaagtcgccttttgtggctgtggcaccctcgtcgtgtttaggccgctcgttgtggcgccacgtgcgggggcgttcctttaccacgctttccggcttgcgcctaaagcaacggttaaatttgcaataccaaatgcttttgctcaggtcaaaaatgtcgttatcaatcaagcaatgctcgcgcgtgattgaatttgggtccgatttgtcgtctttaatttgcaaacacgctactttttcagaacgtcgcgtagactttgacctttccttcaatatcatgctcacgccgtcgcggtgcatcacctctttttcggtcacgttgatggtctttccgtcaatgtccagaatgtgcactgtgcactcgtcagtctcgtcgtcacactcgagccgcgtgtacattttggcggtcgacacgccgcagcgccacgacttgttgcacgtgtggtgcgcaaagtggttgttgttctgccgctttcttagctctttgccaggcacccacacgccgcggcccacattgtcgcggaagcagtcgtcgctgtcgctgccccagcggtcaatcagctcctcgcctacttcgcattcctggcgagcgctccacgtgagcaaatcttttttatccacgggcaccgtttctaatttctcttcgacgcgcgtgttagggtccagcgggccgccgttgtacgcgtacgcttggtaataccctttgtaaccgataattacgttttcgtctaaatcggtctcttcaatgtcaatgctaacgtctttttccagcgactctttaggcggcgtgatggccaggctcttgatccgccacgggcccgtcttcatttgagcgttgcaatgctcggcgcccaagcatagccgcgccgccaacagcacaattgtgataatttttagcatgttcttgtaggacagaacaaacttgactgattttcaagtacgttacacgcctttatatacccatgtttatcaacgtgtttaggcgcctacgtgcgcgcagttaatccttatatcttatcacccactatataaacccgacacgttggccattgtgcgccagtgtcggcccgacggcagcgcagcgcacatcatgcggctttttgtgcttgccgtcgggcggcgtttacattgttagcatgctaaattacaacgcttttcaaagggtgccaccgtcttgtacagcggtggcggttgcatgttttaggttaacatacaaaacgcttaatataatttaaacgtcaacattgttattgctgttggcaactaacctaactaaataaacgaaaaattttagactattaatatgtaagacccctacaaaatggccgattcgccggacacccgcacgttcagctacgcgcccgacagcagtttagaagtggtaataattacaaacgcgcctaatgaccacgacggctacctggagctgagcggcgccgcgcggctgctggcgccgcttttgcaaagaggcacctccggcttgtgggcgggcgcggcgccgtcacacaaactgatacgaaacaacaaaaactatctacacgtgttcggtttgtttaaatacttgcaaaattacaacttaaacgtcaacgcacacccacctgaatattttaccataaaagccattatttgcgacttattgttgggcgtgcaaagcaaaacgtttgacccgttgtgcgaaattaaaacgcagctgtgcgccatccaggaaagcctcaacgaggctattgtgacgctaaacagccacgcggccgccgaccccggcgcgcttaacgaggcgacacgcgaactggccgacgcgttgcacgcagagtacagtaaaaaattaacgtttgctaccgacaccattctggaccacgtgaaaagcattaaagacctggtatgtctcaataagtaagaggatttggcaatgaatttttgggcggcatttagcgcgtgcttggtggggtacctggtttattcgggtcgtttaaataatgagctgcaggaggtcaagtctattctgatattggcgtacgaggcggcggaaggacgctacaacggcgcaataaatgaaatggagttgcttaaagcggacacgtttgtaatgttgtctaacttgcaaaacataaccatgcgtacttgggacgttattgcaaaaaacaacaaaaaaattgccaatcttgacgaaaaaattgacgggctattgttaaaacacgcggcgtcgacacttgtctgataagtaattatcaaaaactttgcgctgcgtctacaatatcgatcaatatgacgtcttgtatggttcccaataacaacgtcatgtacgatgacgcatcggtcatgtggatcgattccgaccacatatttcaaaaccttaaaatgccgcagtctacgtttcagcaaattctgttttctatcccgtcaaaacaccgtaagatgatcaacgacatcggcacgtcgtgcccttttccgcccagcaacaacacggttaagtacatggtggacatttacggcgcggcggtgttggctttgcggtgcccgtcgttgttttccgaccaactgctgacgacctttattgccagcaattacatgagctactgcaatcgccagcgcccgtgcccgccgcagccgcagcccccgtttgattgctcacaaaaacaaataatggacgcgctggaaaaaattgcgcaccaaaacgacttgcttgtcaacggtgtcaatcaaattacgcttaatcagtccaaccaattcctggaactgtccaacgcgttgtgcacgctgcgcacccaaaacgcgcaaatattggccgcaattgaggcttctaaagacgaaattttaaccagactgaaagcgctaattgacgaaattaaaaacgcgttgcccgacataacgctccagttggaagaatttgccaaggaacttacggacgccattaacggagtgtcgcaaacgctgcgcagcgagctcaataacaccaattctattctaaccaatttggcatccagcatcaccaacatcaatggtacgctaaacaacctgttggtcgccgtggaaaatattgagggcggtttaagcgacgcggacaggcaaaaactcaacgacgtgctggacctcgtcacggaaataaggagccttttaatgggcacccgcaaataaatggtcaagaaacgaagcctgtcggttgagcgcgacgagaagcgggcggttcccattaagaaggaaagatccaagcagttctcggcggccgcggaaaagttcggcggcgaggcggcgggcccagaggcccgcctcgccgcgttcctcgacattgaattgaaccggcaaacgccgcaaaacgagcgactggaccgcgaagcggaaaaggtgtacagccaacgcaagccgtccatttttgccgctcagcgcgcaaacgcgttcagcagaaccaacacgtttgtggcggtgtttgcccaccccacgtacactgtggagtacagcaagctaccacacattgacatggttaaaattatgtgtagtaacataaacccaaaatttttgtttaaaaacaaagacaacgaacttcaaaacttgctgccgaacgtgaccgcgtttcgcgtgcaaatcaatgacgaggcacccgcggccgtcaagtcggtttcgtttgaggataaaaagctcaaaatattaatgaaatttacaacagatgaaataatcacgctattacccatgacaaaatgtgtcatctacctaaacattttgacaaacaaagactgggtggttccgcaagagttgctcaacatgtttgcgcagctgcagctacaaccaccaaactttgtgccgtcaattgcttagcgccgcgcccgacgatgcacgccccgttaagccctgaacaacgcgcagtgtacgacaagtacaagttcgccgcgtacgcgcggtccgtagcgctgacgcgcgcgcagctggattgttggcgcgagcagaaggtcgtcgccccaccgcccgtgtcgcgcgaggaagcgctgcgcgttgaggccgcaacgcgcggccagagccgcaacgcactgtggaacctgctgcgcctggaccgcagcaccgcgtcgcgctcgtccgcgggcacctcgctgcgctcgtccgcgcttgcgttcggcaacgcgcaagaaaacgagctgaaagcggccaacgaagagctgtttgcgcggctgcgacaactcgccgccgagcgcgccggcagcccagttattgacacggtgctggattgtggcatgttcctgagcgagctagggctccactcggcgtcgcccgacgcctatttcgccacggccgacggctcgtggctgcccgtggagatcaagtgcccgttcaactaccgcgacacaaccgtggaccagatgcggctggagctgggcaaggctaaccgcaagtatcgcgttaagcacacggcgctgattgtcaacaaagcaggccctcccgaatttgaggtggtcaagacgcacgatcactaccggcagatgcagcggcaaatgtacgtgatgcgcggcgcgcccgcgtgcttttacgtggtgcgctttaaacacaacctggtggcggtgaccgtgccgcgcgacgtggacttttgccacaaggaggcggctgccgagggcgctgcgtttgtggcctttgcgcttgaaaacgcgagccgtgcgcagtttaagcgcggcgagcggcgcgccgcttcatttgcggcaaacgggcacgcgtacgacgcggcgcaagtggcggcgctggtgcgtcgcggcttgtacctggagcacgggcggctgcgttgcgcgcattgcgacgggtttgagttggacggccgtgcggcctttgagctggctctggcgcgcgcgcacgagcagtgtgaggggttggcgctgcaagaacaccagtttgataaccctgccttcctagattttggcaagcgccacgccagccttgtaaacgggcggcacgccgacgcccacgcgcgcgccgtcgagggccactatgcggccgccgacggcagcgtcaagaccttttgttgcggtgtgcagggcagcgctacgtcacgggcccatcttcctacgtgttcgtactatttggcgatagttagtaaaaataaaatacagaaataatgtttaatatttattaaaattaacatttatacaacgttaataaactgtttggacacaaattttatttgaatttcggcgagaaccggtccttctttgcctttggcgtcaacgtacttgttcttgttcagcacatttgtttcgtatccgaccggcttgcagctgccggcatcgcacttgtcgcgctgcaccttggccccgtcggtctgcaggccgtcgacctcatcaaagccgccgcaatctctacgacacccatcaaacacatagcgaggcgcttcgtcgacccattcttttatcacgatgccaagttcaggaacttgattggcaagcttgtgtaattgctgctcgtcgtgctggaccagctgttttatcacattaaagtcgcccagcctaaactgcttggttcggcggctggcgttgtcgtaaaagccgtcaaacgtggggttgtaatcgattagacgaaacgttttctcaccaaaactaaaagtggtgagcgttcgctggccggttttcacgttcacttttaacacgtggtcgctgcccgcttgtttgttgtacgtcagctccatcttgacgacgccgtccgaccggttgcacgtcatttgatcatattcctgctcctcgtcgtcgtagaacacggtgactgcgggcgttttcattttgcgtgtttgctgtatgggaaacggcaatggactaatttaacaatttggcacgcgcccttttatagcgcgccgctaaagataaactgattatgtatgtatttatttttattgtttaaaccctctttaacccgacccgtttttccgcgtccgcaattaacttgtccgcgctctcgtcgctgctgtcttgaatctccatcttaatacgctcgcgtctgttgacgctcttgttggcgaggaccaaaaactgctgcaccgacatgttgacggtcttttgagcgtaggcggcgtggaccgccgcaatgttttgcgcaatgttttgcgcaaacacggcaacccggccgttttgttcgctcttgacgagttgcacgtactcggtaaattgttctttggaagtgctgcacgtcgcccacacaccgaatatatagtttgttaatcgaaatgtgattgtacatgaccgcgtacttgtcaaacggcacgggcgcggcggccaaagctcaagcagtgggcgcgttggcgcacgcgcgcagcgttcacgtcttcgagcccgcaccactgcaaaatggtcagcaggtcgtcggcaaagccggcgtactggcgcagccgctccttggcaaaatgctggtggtcggcggcgaacaatagcgtcgatatctcggcaacgtaccacacggcggcgggcaacgcgacttgaaggggtgggtccatgggcaggttggacagtgccatgaagcactgcgtggcgcggatgcggtgcaacgcgtacgcgcgaaaacggtccttgacgcagggctcgataaactcggcgacggctatcagctttggccgtgctgatggcggcgtcgacggcgcgctcgcggcccagcgcgtcgccgtcgcgcaacgtttggtaaaaccgagtgcttttaaacgcggtcacaaacgcgtccttggtagtgatgttgtcgaacgcggcgggcgtccgcaagtcgtccattaggcggcgtcgcaggcgcttgagcttgtccgcctccactaacacagccttgtccgtcggcgcagcgttgatgaatttgtgtcgcacaaacgccagcagttcgtattggcgctcggtaaagttgtccactgtgacgttgtcgtaatcaaaagcggcggttaggttgacgcgttcgcacaactggttgttgcggtatatctcgcacgccgactcggcacacacgacggacgccaccgacaggtcaatggcgctttcgttccaattgatggcgtgaaatacaacccgcttaaagtaaaccgggtgcttgttgagcagctcctggcaacgaccaatttcacgctgcgggatctgcccgtcagtaaccatgtacagtagctccaagcaagcctggttaaggtccacatacttctgcacccacttgagaaactcgctgggccgcgtgtcgccaccctcgccgttgcgcatctcatagcggcgcttaacgcgttcataattttgttctttgcagtcggcgctccagtgcaagtacaccaccttggcgtctgcgcctgcatttgctgcttcatcctgaaactgctgcagcgtcagcagcgcggcgcgattaaactcacggtcgttgtacgtcgacgccgagtcgtccgtagcatacacgtaatacttgtacatgttggcgaatgatgcggctgcactttatatactgctgtgctccgcaaacctcgcataaacacacgtgatggataacaaaatgtacgtgcgcatggagattaagtttgacgaggacacgggccgtttgcaaattggtgaccgggacgtgtttgtgcgcgtgtttgagcccggccaagaggtgtttgacgaaacgttggaccaataccaccagtttcccggcgtggccacagacgttgtgtttccgcaagtggacacgggcgcgacggtgagcgtgcacaccgcggccggcgcgtactcagggccgctaaccgccagctgcttcaattaccacgtgtgcaacaagcgcttcgtgtttggtgttttgccggcgctcgaggtgcccgccgacgtaagcccgcacctgcgcgtcggcgcgcccatcctctgcaacgagcaattggtgtccgtggtgacggccgtgcacgagcgcgccgacggcgtctggctggtgcccgtgacgggcgtgcgcgggccgcaccaggtgtcgggacacgcgcgcgtgtgcaatggcgtgcgcgcagagcgcctgcgcgccgggcggtcggtgtacggcgcggtgcaactaccatatgacaaactgaagacgcacgcgctatcgcaaacggcgccacacgctgaagcttccgaatcgtgcgcgctgttttacaatgactctgaagtgcgcattacttttaacaaaggcagttttgaattgatgcactggcgattgccggggccttttgttgccacagcgttaaataagcattattgacaatttattattatatcattgaaatagttataatattttaccatgtccaaaccaagcattttacaacaaattttgacagctgtgcaagatgtcgacacaaaagttgacgcgttgcaagcgcaactgactgaattggacggcaaagttcagccgttagatggtttgtccgagcaactgaccgctttggatactaaagtgaccacaattcaagacatactaggtggagcggaaattcccgatattcccgatgtgcctctacccgacaatcctttgaacaaaacccgcagtcaagcaaaattaaaatagcaagtcaatggttttaaaatattcgtacggttccttgattaaatagtacaatgcaatcattaaaaatatcgcaaagtacacaaaaaatgtaagctctttgtacaatataaaggccgcaacggccgcccccgtgttcagcaaaaataaacccgctaccaccctatttaatttgttattattttcgttcatgtccaatagcgtgttttgcctaaacgtgtactgcataaactcgagacgcgtgtacagcgagctgctggccagcgcttggcccaccagcgtcgcctcgtcaaaatctgtaatctggtcactttcatccaattgtagcatttgaccgtccgaattgacctcaagcgccgccacgtagtcgagcaggtggtacagcgattggaacatggcgtcgtcgtctgtctctacaaaatcggcaaaaaattcgggcaaaaactctatgatttcgcgcgagctgttggcgtccagcgtttcaaagtaggcggtaagaaacgtgcgcgacaagtcgtcgggaaactcgcgcggaaacatgttgctgtacccaaacgggtcccacagcgccagcaccaaatcggccagcgtgaacaaaatcaagactatgcccaccacggagctggccttgatggcgatgcgcgttagggctttggctgccgtggtgagcgtcttgatggcaattcggttcatggaatgcacaatcgcggctttgtacgtttcgcccagcaagcgcaccgtgacgcgctgcgacgtgcttaccagcatgcgtttaagcgccgggatcaacgctgtgttgatttttttgagcatcgttttgaaagcggtcatwagcatgtcaaaaccaatgtcggttgcgatgccaaacactagcgaatattcctccaaaaaagaagcaataatggtttctaaatcctcgtcgctggccgcgcgcagttgcgcggcgacaactgcgcgcggcgccgcgtccgcgtacgcaattggcgttttggtaaatcccacttcagccgtgtacgacagctgtacaaacgcgccgttttcgattaaccccagctgctgcaatgtgggcgcgtcttcaaattgcttttcaaagtcccaatcgaccgcgcggtcgcgaacggcacgccattgcgccagcacggcgttggagtcggcgtccgggcgcggcggcaagatgggcgagggtgctgtgtagtcaaaatcgcgcaattcagaaaaaatattgttggttagcattttaaacgtgacgtacagcgtgtcacccagcacgaacccaatcatggactcccaccagcgaaaagaacagccgccgttcataaggtcgcgcccaaagcggcggcagtaggcttcattaaattcgcctttaaaccgctctggaaacaacgggtcggggtcgggccgcacgttgaacgccggcacgtcgtccacgcccatgatggtgtgctcctcggtgcgtaggtaggggctgttaaaatacatcttggacgtggaatcgaccagcacgcactggttgttgggcgtgtacgcaaactcggctgactgcacctcgttttcggcaccctcgcgcatggccgcggcccggtccatgtggtaacacgcgggctgcgcgtacgccacgctggtttccgaggtctgcgtgtacgcgaacggtgtctggctggacaccacgcccgtctcgtgaaacggatagcagctcgcgctttcgcagccgcgccggctgaaggccagcttgaccgcgagcgcgcggtccgccagcagcggcggcacgtaatagtcgtcgctcgacgcgggccgcagcgtgtagtcgattagaatatgcggcagccgctcgcgccatcggccgataaattcgagccggtgcatgtgcgccgcgtaacggctcgcgttagtcaggtccacggcggttagcacggccatggctgcttaatataacaccaacgcgtctttcgaggatggtcgtcctcgaaagacgcgttaaaataaaaaaacaatattttactaataatttatttaatatgtacaaacgtatatcttatcatactcttggtttgtaacgggctcaaagttggcaaacgcgtgcacgtgcagcccgttttcggaataggttgccaggcccatctgatcaccgctcatgctataaaacacgtccgtttgcaccagcacaccaatgggcgcgccatccaagctaacggtgtgcgctcggtaccagcactcttccccgtcgacacgcgcgctcgccgcaaacgatagtttgtctaggtcggccgcttgcacgggcgtgttcaggaacagcaggacaggcaggttattgtacgggccgaacccgcgcgccgcaaagtactcgcgcaaatctgtttcaacaaatttctgctggtactgctgctccatcagctcaaaggacttggacaggttgttgtggtccacttgcgcgtccacttcggcctcgtcgcagaacaggttgtacagcgcctcggggtgcaggtccggcaagacaacgtcgcacacaatacgaatcagcgccgggtcgcggatttcaccgccgtggtacgtgttagacaacccggcgtggccgtcgcgcgtcgcgtacacgcgcaccatgttttcggtgcgcggcggttttaacccaaacgcaaagccgcgccgccccggcaagtggctgagcgtgtagtcgccgggtgcgacgcgcacacgcagcggcgccgtaacgtcgctgatggtgcttacaaacatgtactcttgcgcaaaatgaaacatgtctgcgcttggttacacactgattcttagaacgcctgcgcagcatttatatgcccacaatgttcggaccgcttcaatcgtgtttgtaaaaacgtgttaaaaagtcatatgaaacacgttttaaagttagccagtcttgtgttttatttttagctatgcgtcagcgccgaccctgcttttcaagtataaccaatctagaaaaccgtgttcagctatgcgtcagcgccgaccctgcttttcaagtataaccaatctagaaaaccgtgttcagctatgcgtcagcgccgaccctgcttttcaagtataaccaatctagaaaaccgtgttcagctaggcgtcagcgccgaccctgcttttcaagtataaccaatctagaaaaccgtgttcagctatgcgtcagcgccgaccctgcttttcaagtataaccaatctagaaaaccgtgttcagctatgcgtcagcgccgaccctgcttttcaagtataaccaatctagaaaaccgtgttcggtttaaagccgcgtgacttttgtaataaaaaactaaaataattttttatataatatattatttacacaattacaaatttacaatatatttcatacatatttttatatacaaataacatacaaagtttaaacgtcaatattcttggccaaagccgccttgagacgttcgtcgcagatgcgagcgtgtaatttgaggtcataatagcgtaccagttcgttgtgttctttgtgcgtttgcaccgcttcccagtgaaaatacaaagcgtcgtatttatcgccaaacacaaaccggttagtaaagccgcaccggctgcagcaaattaccgggttgttatggtataatttggtctttttacacgccacgcaatagttgcctttaacggggcgcactggaaatgtgaccacgcctgtcacaaactcttggattgcaaacccgtacatttcaacaaacacagtgccgttaatggtgtcaaagcggcggtcgtccaaagctttcatgagctggctggggctgctaaccgtgaagcagttgacgtcgtccgcgaccgtgggtgcgtcaaacaaattgcggtagcgcaaaatgcgcgcatcgtaattggtttctttgagcaccaagccgccggtggtgctaaaagaaatgtacatgatgtgttcgttgggccccctgtggtcgcgcagcagccgctgcatggtttcaaacggaccttcatgatgtttgatttggattttgtcccgtttgaaatattgaacattaaactcgagcggaaaaatgtattggtaaaaaaacccgctttcaaacaactttttagtgtgcacagccgtaagcccgggatagatttcaaacgagttgagcgggtccttgagctcgtcagtgcagtcgcagcaggcaaagtcaaagcggtcgggcgtgttgggcggctgtggcggctcgggctcgtcgccttcggagggcgcgcgcggcggctcgcgcagcacgacgtacagcagccacgggcgcgtgttgtccttgaatttgtatccgcaaatggtgcactgggattcctgtacatactcgagcccgtcttttgtgttgacgttttccgcgcgaccaaaagccagcatgtccttgctgctgatgtagccagttacatagttggtggcgaaacgcagcgtagcgcgcatggcctcgcgctcgttgtcgctcaaaaagtgctcgcgtaggtcgcgcgcgcgcgcgtactccaatttgtggctgcaagccgacatgtcgtcaaaccggtggccgtattcgggcggcacacagttggaaaatactttgttgtgacggttgtcgccgcggccgatgcgtttgacaattgcagcgtgcgcttgctcggtcttgttagcgggacgacgcggcaaggtcggcgcggcccttgacaggcacaattgacgtcgttttaagcgggcggcggcgtcttggccgcgacgggcgcttttacttttgcggggcggcgccgtagcgcggccgttcttccgcgcgtcaaaaatgttgttttccttaaaccagttcatgctttgagcgttcaccgcaccactgtgcatgttagccgccgcgcgcgcttatatacgcctgctatccggcgcgatatcgcaattatcacaatgcgccgccgatcacgtgttgtatgatattgccacgcgccgccggtcacgtaggcattgcgctatcgcttacgtcactgcgtttatcgctttaatcacaaggcgattataaataacgcgtttacggtctaaaaggtctaaccgcgcgccatagtaagttgttttgggcgcgtaacgcaacatgattaaaggtagctacttgcccaacgtttcggagacccgcgacgacctttgcgcggcgagcaaggtaatgaattttaattttgcgtttgcccacatgtactgcgcagatttaaccgcagacaccaaggcgcagcgcggcgtgcgcgccgccgcgtttgcgctacttgacgacaaacacttgaaattgtacaaacgacgcattgagaacaagcttctgcgatattacgaccgcagcgacgacgcgtcgctgccgcaacgtttgcccgaggacgacgggtgctgccaccactttgtgaacgacgccgagcgcgtggtcgagtgtgtaaaaagcgtggaggcggccagcgcgggggtgaacgttgttgtgctattgccgtatttaaaacagctgcaaattgtgcttaaaatgttgtttgacgctttcgcgtgttgtagcaaaaccatcaacggcttgcaaatgtacgtgcacgatttgctgtcacactgcctgttatgcgcggacaaaatcgaagcggcgaaccgcgcgctgcaggtaataaacttgtttttggactcgccgctgtacgagtgtgacctgtgcaaagaggcgtccgccgacaaacgttttctcacgcgcaaagactgctgcgcgtacgcgctgtgcaacgcgtgctgcgtggcgctgtggaaagcatcggtcacgcacgccaagtgcccggcgtgcagcacttcgtttaaataagtgcgtacgatgagcggcaccaacctgattgcgctgccgccgagccagttcaagtacctgtttctgtgcagctactttgacctaaaagactttagccatgtgcctgctgaggctaaagcgtttatttccaactacttggactgtaacttccgcgtgctggacgaccacacgctgcaaagttacaccgtctacttgaccagcattcagctgcgccacttggtgaacggcccgcccgacgcgtacaaatttatcaaaccgcagtttcgcttcgtgtgcgaccgttccgccatagacatcctcgagtttgattcgcgcacgtacatcaaaccgggcacgcccgtgttcgcgaccaactttttcacgtccaacccgcgcaagatgacctcgttcatgtacagcgaatttaccaaggtttacaaaaaccggctgttcgccaacaccaacaaccgcggctgcgtgctggccggcgccgcgggctttctgtttgaagatgcgtacgtggactggggcggcgtgcgcatgtgcgccgctccgcgcctaaacaacaaccatcatccgttccggctgtatttgctgggcgaagagatggccgcgcactttgcggccaacaatgtattaccgccgcaccccgcgaacgcggcgcgcatcaacaacgccatgtttatgctaaaaaattattacaaagggctgcctctgtataagctgcaataccaagtggtgaacagcatgaagttctcaacgcgcaagcccaatgaagtgtttgcagaaattgacaaagaactcaacagccactcgccgtttgtaaaactaattcagcgcgactacatctacgacgcgcagtttccggccgacctgctggaagtgctcaacgagtacatgaccaggagttcggtgataaagtttattaccaagtttgccatggaagagcacgcgtccagcaacgacatgctgcgcgagatcgtgtttgaccgctacgcggtaaacgagtaccgcaaactttacatcaaaatggagctcactaacgtttttccggccatgtacgacaacgaatcggcgtacttgtttgtcaacaacgacctgatgcaactgacgggcacgctcaacgcgttctacgcgcctaaactgcgtattttgagtatcctgtcggtgaacaggctgtttggcgcaaccgaaacgctggatttccaccccaacctactggtgtaccggcaaaattcgccgcccgtgcggctgacgggcgacgtgtatgctgttgataagagcaaaaaaatatttttggtaaaacacacattttccaacacggtgcctgcatatcttttagtaagaggtgattacgaaagtgcgtccgagctcaagtcgttgcgcgaccttaacccttgggtacagaacacgctgcttcaactgcttatcgttgacggtcccaccgcagaacccctcagaacccgccgcttaacatgatctacactgaccccaccaccggcgcgacaaccaacaccgacgccaccagcaacaattaccttaacaagctgacgcctaacacatttttaattatactggccgtcgtggtaattattgctttaattgtaattttcatgcagtccagcagcaatggcaacaatagcagctatcccgcccgccaatccggcagatgggctttgtgaacccgttgaacgcgaccatgcgcgccaatccatttgtgggcacgccgcaacgcttgtaagtaagcggttacaaaatgaagcgtatccggtgcaacaaggtgcgcaccgtcaccgagattgtgcacaatgaagctaaaatgcctaaaacgtacgacctggccgagttggaccttaaaaacatggccagtcgcgaaacagaggaaaccatgaaaataaagctggtaatcagcaagtacatggccatgcttaacacgctggaaatgactcagcctttgctggaggtgttccggaacaaagccgacacgcgccaaatcgtggctgtggtgttggccactatgggctttgtacacaatcggttcaacccgctggtaacgcattttaacaacaagatggagtttgtaatgacggaaacggccaatacaactatccccggggaacctattctgttcaccgaaaacgacggcgtgctgctctgcgccgtagaccggccctctatcgtcaaaatgctcagccgcgaattcgacgtgaacgcgcctgtcgacttgaaggtgcccgaccacgggctgcgcattgctaaaacgctagccgcgtccaacaagcgacggcggcgcgacagcgacgacacggagccgttccgccgacccaggacattcgacgagtacaaccggtgcatggacgcgctgtccgactttggcataaccgaaaccgaagccacgcagtatttgacgctgctgctaatagtcgagcatgcgtacctgcactactacatttataaaaactacggcatggtggagtattcaaaatcactgctggaccactcgctgttcgccaacaagttgcgctcctccatgagcaccaaggcgaccaatttactgttaagcaaattccagttcgccatcgaggaattgacaagatcagcggcgggggcggctcgaaattttccgtgtacaactttaacaaataaacatgatcctgttaattttgtttttggttctccttaaagtgttaatctttagacggctcaacgagatgcacgtggactcgcaccacagcaaaatctgcccgcgcggctattttggcctcaatgcggacccgtacgagtgtggcgcatactacatgtgcccgcacaagctgcgcatgttttgtgacgccaatcacgagttcgaccttgactcggccagctgcgtgcctatcgaatacggttcctgcggcgccggctgcacggcgaggttgtaccgcaacctgcttttgtagtcgggcaacgacccggatgtaatgttatcgaaaacgcgttctatttgagcggtgcgccagtgccgattaaacaatgcgtcaattctatttttagcgatgcgtcaaacaatgtgtcaacgctgatcttgtttttcaagtacaattgttttggaaaaacgtgataataaagcaacgagctaaattagcaatgtgttaacgttaacccaactttcaagtttaactgttctggaaaaacgtgtttattaataaagtaaataccgtaaataaaacacagtgttacaatttacatttattcctcaaactgcacggggctgttatcgacgcgcaaatcgccgcacaggaacttgaccacgtccacgtccttgtgatgcgcgcggcagcgctgcagctcgttaatgaagccagcgggcacgttgcccgccaaagagattagcaccttggggtacagttggtcacccgcgctgccgtgcacgcgcagcccggtgatgcgccgcgtgcgcttcgcctcggctgaacggcgcacaccgagcacgtgccacacctcgggcgcgacgcgccccgcgcgcaccaccgcaaaccccagcggcgcggtgtacttgttgtgcacaaagagttcacggaacaggcacggcgcgcgcacgcaactaagcaggtaggcgccccgcggcgcagcgccgaccgcgacttgcatgctaatgggtcggctgttttcataaccgctcactaatcgcgtcttatcaggcggcgcgggggcgcccattttgaataaataaacgacggccccgttggtggcgtgcggcatgtagaacgatatatcgttatcttgttcgccatccggttggtataaatagacgttcatgttggtttttgtttcagttgcaagttgaccgcggcgcgcgcaccaccgagcaatgccaaaagatatgaataaagcccgtgacgtttttaatagcgcggattcagaacgaatgccccgccatacgtttggcccgtgcacgccgcgccaaacgtcctttcacaatatgcagcctgttatgaacataaacccggttgatatagaaaggctgcctgttctgaacataaaccaggttgatttagaagataccgacatgtttacggctaacccagatttgttggcgacgcttgcacaagaaggtaccaatttgtataacgacgttacaaacgagtttgcgcatcaaagcggcgaaacgcaatcatttccagaaaactacaacccgggcggcgaaacgcaatcatttccagaaaactacaacccgaacggcgggggaagcaagcgcgtgcgctctgactcggaacaggacagcgaggattcttccaaaggtaaaaagcacgttaacagaagcaagattcgccaacgctacaaaaaagtggctattccgagcagtaccacgttacagaaaagttacaaccttcatgtcagtgttaatgcacctcccaaggagattgcgcaatattttggtaaagacttttccgcatgcgaggacaaatttgctagcgacaattccatgacagccagccggttttgcaatcacatgtctgaaacggcgtactacatgttcgtggtgaaacgcggtaataacaagccgtttgaagtggtatttgccaagctggtgaacagcgtaaccaacgagtatcaaaacaactatcacacggtcgacaatcgcgtgtttgtggtgtcaatcaacaactttaagttcatggtgtcgtacaatttagtgcgcgaattagaaatcgaaattccggcgcacgtgaatctgtgcagtgatgaggaagcaaagtgtaacccgtacgattgccactttgaaccggttaagaactcgttcgaaaccacgctgatcacacactttcatttagacatgtattattgccaaacaacgctgatgacgctgctacattcggtgggcgaaaataaaaccaacttgttgatggacagagtgtatcaaatgcacaagagccgtttgttgtacacgctgcccatagtgacgagcttgaaacagcccgcgatcgaaattacaccgcgcagcaaaaaatacgcatcgtcgtacgtaacgcaaatcctcaattattccaaaaacttgcgctttcccgagcacaagtacaatggcgagtatactaataccttagaccaacatattacgcagaaaaccaagcttacgtacaagtacagcagcgtggcggaattgttttttaccccgtttggcaagcgcaacgataacagcgcggacagcctcaaaaaagtcaaaaaggaagacggtaaccggttgctggttgaacaatacctgtcgcgaaacgaacacgacgagaacagtcacaactttattgttttgcagtttggcggtgccaacctaaataacgacgagcgcctcactattgtcaaaaagggccgtgagttttactgggtcgccggcgaggtcaaagacattaacgttgacgaacacgttaaaaaatacccacaaaacacgcatcacgtgtttcgaatcatcaactccaaccggcgagagaccaccacgtggcacaataatttgctaaaaatgctagccatgctgttgcaaaatttgataactatatacgatgttgagcagtactcgaataaaatagacaaatttagttataaaagaatttgacaattaggttttaagttatgaattaaatgtttaattttaagttatgaaataaatgtctatattacacaaaatttttttttattcacgccttgccggcggcggttgcatgactatgacaggggagggctgcgcggtcgccgccgtcgccgatcctccgctgccacccttaacaacaaaccgatatataaaataaatgattaggccaagaaacaacacagcgccgattagccaaatgagcggcataagcttgttgctgacgctgtcgcttgagttggacgacttgccaatcaacccgtcctcgcccagcaaatggtccaaacccaagtccccgatcaagtcgcctaaattgtagggctcaatgcacatgatagtctgaccgggaaccaaatcgctgatgtctacgtactgcggcgagtccgggtcggcggcggggtcgctttggcgacacacagtttgttcaatttcgtaattaaacccattgcaaatctgctgcaattgcactgcgtcatttacgagcggatccttggcacaaatggccacttcggacgtgttcatgttggggtcgcgccggcacgtgcggctgagcagcaggcatgcctctgccgtctcgccgccgttggacccgcgcacgtagtagctgccgcccgtattgttgagcgcgttaataatgtcttgcacaagcgtggccgcgctaaatgccaaatacgctccaccggccagcagcacgcccacgcccgcagtcttggcgccctgcaaataggtgttaaggcgcgggttttgctgcaacgcgcggtctacgccgtcggccgagcgtacgttggtctccggaaagttttgtttgaccgcgtcgccgcgtgtgcgctttacgtgaaagcccgcgtcgggcacgttgtccacgcgccgcagttgcgccagcgacccgatctgcgggtcgctgatgccttgaaacgtgctgcggatgcgcggcacgtcgttgttgcgcgtaatgcggttcatgtcgcccgcgctcacaaactggttgtttgacaaattgtagcccggctcaaaccggccgccacccaggttgcgtgtgctgggcgtgctaagcacgttggtgaaccccgcgggcgtggaagggagtacatatcgcagattgtcgctaacaaaatcggcttgactggggtaaactttgttgaccctacgcaagttggtaaaaaaactcatgttggcgttgtggcttaataattaattaataaatttgcgccaacttttttgtagtacaaaaaaacacgtttttgcgcacggccccatatacagtacaaagtctacgtttcgtagactattttacctaaatagtctacactgttctatacgctgccaatacactaccctaaaaccaactattttgcagtgcaaaaaagtacgttactttactcacgtactgcaagcaggtaagttactttactcacgtacgccatgcctcgtgaccggacgcgggcgtaatcaattgcgccttatcggcttaacaacagatatcttttatgagggctacgtgactgcaagcaggtaaagcgttggttcaatggtgcaaggcttatcggggccacgtgacgcgagtgcgcaaagataacggccttatctcgcctataaatacaggaccaacgttctgaaaaacatagtttagcagcacacgcagctatgagccgttctattgacaccaacacgcccgcccgccggcgtaacaatttgtttctggggcgtcgcatcatttatccgccggacacgccgcgcgccgcgccgcggtccacgcccgtgccccggcagcaattgccaacgcccgtgccccggcagcaattgccaacgcccgagcatgttgtaggcgaccgccgcgctccggtgcgcgtcttgatctttacgccaccgtcgtcaccaccaccggcgtcaccaccaccggcgcaagtcgaggtgcctctgtactgccatatttgctcgtgcacgtacacaaacctgcagaactacaactccacgtttgtaacctcaacagagtgttaccacgccgtgtgctttaagtgttacgtgagtattgtgttcgataaggagttttacaagtgcagcgtttgcaaccgcaccacagcagcttgccgcgcgtacaaccgcgacggcgtggtggagttgacgacggtgcgtactctgcgcgaccacgaagccatcaaaacgcactggaataacctgtttatacacaatattccagattcccctttcgacgacaaaaacaacatacgcaagctggaagcccaacttgacgagtcacgcgctttagcggcgtttgctcaacacaaagccgacatggccacaagcgacaatcagatgctcaaacagcagctcgaatgcaaagcggttcaagcgcaaatagaaacgcgcaaaaagcttgtactgcaacagcaacacgacgcgctgcgggcggcttacgacaaattgcagaaccagctagacagccaagtggccgccaccaaggtcaagatggaggagtttgcacaacagcacgcaacgctaatggaaaactacaaaaaactagttgataaataataatgtaattgtttattgtttaataaatgtacagtacttaaagacatttgttatttattaccacctttgctatttaaataccaagccacgcctagcatgcttagtctgaacacgttatggctaccgagtggttttgcggccgcgacactaataaatttgtcgggctttgtaaaatcgatccttataaaaagccttttgaagtagtcacgcttcaagaggaccacaaaatttttgtggttttggaaacggccagcgccgcggcgcgcggcaatcgcatcacgcagctaagcctgtttaacgattgccgcgtgttacaaaaacccacccgtcaagtgctgggctttggccgtttgcccgaatctctacaacttgtgcgggcgcttgcaaacgagtttcctttgctgtacacgtgcggcgtgcaagacaaagccggcaacgaaataattaaacaattgctagacgcaatcggaggcgttgctgttatggacagcatgtcctattttgacgatagtaatattttatattatgttaataaatctttaattaaaaaataaacgtttatataaaaataatttatttttattttattacaaagctcatacaaaacaacaagaataataacatattatttttaaaaacacgctaggcgcctatattacattgccgtaagtgtgtgtgtgtgtgtgtgtgtgtgtgtgtgtgattacattgatgcgccaatgttgcaaacgtaatgccgaaatcgcgtcagttgtcacgcgtcaagttgtcaaaaacacacctggtgtttcccacaattaacgtgttgaacaaaaagcgcgttcggcgatgacgcaacgcttaatagcacacgttctacaagtataacggtgcttaaaaaacctaataaaatgccaaatgttagtttttgtttttatttttaatattcatatacatatcatacaaagcaatcgcgtcgtgcgcacactataattctggcgtttcgagggtccacgtagccgtcgagatcgtaatcgctgatagcttttaactgctctctggtgagcgactgggcaatcccacccgcgtctcgtcgggcaggaacacgcgcacctgttgcacgtcacaaccccagccgagcaactcggccaaactgcgcgccgtgatttcggttagcgtcgcgtactccgcagagattgtgtaactcaccgctgacatgttgattggctggttgattgtgcctgactgtgaacgtgcagccctacgcgcgcgttatcagttttgcacgtgactgtaatcattttgtaatggaggggcggtcactatataagcagcgcgctcaaacccaaaagcacagttcgctgtgagccaggctgtttacaaggcattatgtcttcaagatactctccttacaacaactactatcggcgccggcaggaacgtcagcgatacaaccagcagcaggcgtttttagtggaaactttcaaaaagaaaccggtaatgtcattgttagttacgtgcgccgtgtgtttggacacgtacaccaccaactccgacactttaatcgactttttgatgcccaccgaatgcacgcacgtgttttgctacaagtgcgtgttaaacttgtatagcaacgccatgaacgtgccgcgcgccaccgtcgcttgtcctatgtgcaacatagacgtaactacgtggaaatctttttttcccaacaccgtggtaagttgcaagtttgtcaaacggacggctgaccgcgtgccggccatgcaacagtttaacgaagcgctcgaaatcattaaaaaccgacacgcggtcaatattgaagatgcatcttttaacctggaaacacagctggcggaggccaagcgtgagacacaacgcgtgcaagaagcggccgagcgtgagacgcagcgcgtgcaagaagcgtcacgccgtcacataccagagcgcgacatcgcgtacgcttcgtcgtgcgaacaggtagcttcgctgcaggcacggctggttgaaatgcaggcgcagctggatgctgcgcaagaagaaaaccgcaggttaacggccgccgccgcgccggcggttgcgttcacaacaattgacgtagactttgacgagaacgcgagtcaaagcacgggcccgcatgagcggttccgttcgctcgtgtactccaccgtggcggacctcatgattgaggcgcgcatcaaaaacctgcaggaccttgtgttcgccgcggacgcggaccgcatgtcgtgccacgtggacatcggcgtttcttttggtttaaataggcaaagttaataattattttaagtttataattgatatagttgataagtatgagcaataaacaaattatattgactgagcatgacgagttttttattgtacaacctttacagccgcccgcggtcgaggtgtccccgcccgaacccgacgaccccgcgctctgcttgaccacgcaagcgcacacgcagtttgtggtcaattcaccagtcgacgatgcaaccgcgtgcgctggcctagtgtttcaaaaaatcgtgtctagcaatctgcctatagttggttagccggttgtcaaactcgaatcgggtcaaaccgtagacaaagtcgcgcggcgcgccgcgcacgccctttagcgcggctatgtcaaactgttggcggcgcttcatgctggccaagtccaacacttcgtccacgctgcgctcaaacgggtgccggccgccggtcaacagcttgtaggtcagcacgcccacggcgtaccagtcaaaagagcgcgcgtaactttgccgccgaattttttccgggctaaaatactcaagcgtgccgtcgtgcacgccaggcgcgtgttcacgacggcacaaaccgtagtcacacaaatacacgcggtcgcgcgccctaaagtataagacgttctccagcttgacgtcgttgtgaatgtagcctgccgttacgtgcagatcgtttagcgcgccgcacagctggcgcacgatattggccaccagcgcgccgtccagcgccccttcagcctgcagcgtctcgaacaaatcgggacactgcacgtagtccatcacaatcacaaacgcgcgtggcgagccgtagctaaagtacatgctcacaaagttggggtggtccaccatcaagtcgtgcacgttcacctcgtcggcgttaaagtggtgcgcggcgattgttttgcgcaaaaatagtttgcttgtggggcggtggtaaagcacgtcaatcttgccaaaacggccattgaccattttggacgggacgagcgcgcactcattagtaaactgaactaaggactgcaacgtcgtgtccatgatggagcgccagtaccagtccgtgaggtcttatttgaacgccaccgcgccgcccgacgccgccgcgtttttcgatttggttgtagggccggaagcgcgcaacattagacgcaacttgtttggtcggttggcgcgtctcgatagggcggccgttttggatctgctgcaactggccgaaaacatttacacagacacggcatacatacagtcgcctaccactgctttcgcgcatccttcggcgcgatatttagcaacgctagaccgcatgcgccagctgctaatcggcgtgctggacccgcaggttaggcaagtgctaaacagtattatggcgcgcattgaaagtttgctgcgccagcaaattgtgaacgaagtggaaatcacaacgctatgcggtgatttttacgaggaatatgcaagatacgtgtcgcgacagcattatgcgccgccgcccggagcgtactccgggccgcagaccgccgagtttatgccgcaactttatcaagcgttgccgcaacccgaagcataccctctaccgccgcaacccgaagcatatcttccaccgccgcaacccgaagcatatcctccaccgccgcaacccgaagcatatcctccaccgccgcaacccgaagcatacccaacacctccgccgccaccttacccgccgcaagccacgcttcagccgcaccaagaggaccggctacctttgccgcagcccacacggggtttgccaacgccgccgccgtctaacgcggcaaaatcaccgccgggtacgttttctaggcccacaaacgagtttacttacacaagttttgcacaacaaaacgagcctgcgcccgaaaatcagcccgctgcacttaaaaaaccgctcgtgcctaccaaaccaccacatttacaatccaaacctaattccgcaggtgtaccaactgccgccccgccgcctccaccaaacatgccgccgccgccaaacatgccgccgccgcttgacgacttgctgctagatgcgataatgtcggagccgcgcaagggcgagcccgatcgtggcgcgttgtttgatcagataaaaaagggagccacgcttaaaaaagtagaaaccccaaacgcgcctacggacacgcgcggcgacttgttaaaccagattaaaatgggaacaacccttaaaaaaacgggcagatttaaagatggaaatttagaaaatttaagcgatacaaaagctgggaatgtaagcacaaaaacggctcccacagtgatttttggcgcgttgtatgacactataggcgaacgccgaagcgcgaccgcgctttcggatgaatcggatttgctaagcgagtctgccagcggctacgacgagcccgacacgcagatacaaagagcaagcaaaggtgatttaaaatttgcagtacacttgtttaattttgctaaagacagcaaactgtttaatattcaaaacgttacaaacaaaaagctggaaaaaatattacaaacagcatccggtttattgcgaaaaagacccagaacggttgaaaacgtggaaaaggcaaaaaatgatttgcgtttgtttagcaagagcgttcagctgactgaaaacgcgttggacagccagtcgcccgtagagttatacgcggcgaacgcgccgcaattttatgtacaaattgaggacctaatttttgccggccggtacgacgacgtgcgcgctttcgtgcaggcggttgacgcgcccgacgatttaaagttaaaaaacttgttaagagtagccaacgaattgtcggcgaa

SEQ ID NO: 10 - DNA, 129593 bp, Choristoneura Fumiferana Multinucleocapsid nucleopolyhedrovirus
ttagtatgcgggcccggtgaacagaggcgcatcaggcgcaaactctttaaccttgaacaccagcgaaacctcaatgagcatttcctcttcctcgcctgaatctgtgccaatgtacacgatgggtttgtaaaagttttcccagatgacgcggttcacaaaggattcgaacgaattggtgtattcggcgtggatgttcataatgggacagccgccgccttttttcgccaggctgatgcggtattcgttgttcatacccacgtacgatggctcaacgattctaatcacctcgtgcggcacgtaatcgcagtcccacctgagcgcgtgctggcgcaagaatttgtagcagcggttgggacgggtgggacgcatatttacgactaggaacacgtccatgacttcttggtcgttaacaatgggaaagctgtcttcaacgaaccgggtccaggtttcgcgcaaaaactctttaccgctccagttgacaatgagtttcatcgtgtcgggtttaacattgcgaatctctttgaagagagttagtttttggtttttgccaggaccgagaaaggggtcttcggccaccatgtagtggtccagcggatccaagtgcttttcgtcctcctcatgttcgagcaggtgcttcttgcgctttcttttaataacggatcctaagtttttgtagtatttgttatcgtacacgtaggtgcgaccaatggttggccggtacgaataatctggcatagttataggaaattatattacaaatgtgctacaaaaccagcaatttacttactaataaaataaaattcggttaaaccaaaaattgtttatttattaatcaaattattgttttttcaaaccatccatttttattaaacggtcctgttttagctgcaattgataaatgcggtcgacgatgtccttttcgcgtgcaatttcgtctaactgggcgctggtcagctttgaccattgaccgtcgtcggcgtcgatcggcgcagcagcggcctccaacgcgtggcggtccgccgaaatttgtacacgctttaaggccgccttttccgcacatttattttttttcgccttcgcgtcacatcgtttgttcaaatgcgctcccacaaaacgttccaggtcgtacaaacagtgtaggtccttttcgtcgtccagcatttcgcacccagtttgactgctccagcggtaaaacagttctaaaattttttggtcgctggcggccatcttcccatgcttactaacaccaactaatagttgcaaattggattcaagcccttgcacatgtttgcttttgggcacaactttgtgacggccttcattttcgcgcagttggacggcttgtatgtgttctcggctttgatcaacaaatgcgtcacctcgcccacacatttggcatccatcctgtaaaagtgcagcagcgcgccgatcaaacacgccgccttgcattttgtgcaagtgagcacgttggccagataacagttgaactcaaatcgttttctgtacatgttgccccgcggggcgctgccgaggtcggccataattttgctcatgcacaacggcatgttcatgcgcgccgtcaacaccttagtgagactctgcggcccgtccgcgcactccttcaaacacacgttgcgcttgctgcgctgcggaaagcgacgcgtcgttggcaccttcggtttgggtgcggccagcagcgcgagcaggcgcatgcccgacatgcgtataaacagtccgcgctcaaacacggtgtacggcgtaagctccagcatgcccacgaagtcgttagggtcgatcaaatacgtctccggtttttttacactacccgcgcctgcggcggggttccacacctggtccatgcttacaccttatcgcagatcaagctcgagtgctggccagccgctgcaggtttgattataaccgccggcgctttgtcgacgccgtccaaaaaccggttgcaatcaaacccagtcgttgaccgcgtgcacagctcgtgcacgctgcggcgcaagctatttaaatcgcgtcgaagctgctctcggtcgtagtcggccgccaccgcagccgcgttcctcattgtggggcgggtcattatatattattgtgtaaagttgcattaaacgaaagtaacttactatgcccaacttcgtcaagtttagtttgcggctgacgcgagaatctaaggaaaacattgtcgcgcacattggccacctgtcgcgggtgcgcgagctgatcgacagaaacgtcacgcccgcggacgtacgccgcttcaggtttccggaccgcgacgcgctcttggcagcatgcatggtcgtcaacgttcaagcgtacggtgccgacggcacgattcgcctgcagcctacgctcatttactatcgcgtgtgccgaaacttccgcgcggtggccgacgtgcccgcgcccgacgaccactttattgcgcgttacctgtggcccgagtgcggcacgccgctggttatcgaccacccgcttcacgtgtttggcgacacggaagagggcgtcaacgagctattagaggtgcagcgtattaatgcgggcggcgacctttagttgtcgcgcaattgttgatcagttaaaacacacgtcatggcacaagtaaaaaaattggccagtttggtggagcggatcagcgtaccaacatggttcaattatggatagaaacataaaaaaaaatgctgtaacagatacatggattttcaaaatgtgcatacattacacaagaacggggattcatcatccctgtctctcaaacagctttgttaaaaggccggtgtatctgcagccgcacacagtgttaataaataataactacgcgcaggacgcgccacagtttgcaatttgaataaaacaattgttagataaatttattgacttttattattgttgtttaatgttacgtaaaattaaaggaccgcttaatcgaattctgtcgatttcaaattcgccctccaccaaagcgatggtaatgtcgcgttcgttgtaaaacacggcaacgttccgtggcaaacctttgaacaagtttttgtttctatttgtactaatggcataatcttttagcgccttgtacggcaactgcattttgccataaaccgatgaaccttcgagcaatttttgtgttaaaatttgtaaatcaaaattgatttggcccgacaccagtcctcgagcgctgataccggttacgggatagatcactagtttatttttgtagtcctcgtggcgcgccgtgatcacggacaccatacgctctttttcaaaaatgggtgcgccaatataaatttggttggccaacgaaaagttgctaagcgcaaacgaatacaattggccataaaccatgcgatttttgtgactgtgaaaatttgtataaacacgatcgaccgttatcgtcgccaaactaccatcgcttaacagcaccgtcagtttggtgttgttggctattcgtggaaacattacattgcttgctacacctggaaaatgatgtaacatatccaattcctcttggttcttggtaaagctttgcggaggaataacttgaatgaaagccggtttgtcgtcgacttgtttaacagcaatcgttttttgcgtgtcatttacggtgtatagcacattgttaattgttgtcacctttacacttagtgcggcgcttgaaacgcatattaacaaaaatgtttttaacattgccatttaatttttttatttgccttaataatacaacttttacactacgacactcgtattttcaatacattatttacaaatttgtagctacacttgctggccagaaaacgcacaaaatggttgctaatggctacgcggcgcttgttttttacgaggcttaacgcctcttcatacgacatttgccgactgcgcatataatagtacaccaccagtgccgccgacctggactcgcccgcgtagcagtggataagcacccgcttgccctcgccgattctgcgcgtcatgtactcgtagagcgcaaacatcgcgttgggaagggccacgcacgtcggcgcgtcctcgcaataaacgtgaatgtgttcgccggcgggcaggccgagcgcctgcctgatgggtcccacgtccgcgttaatcagcgagatcacactggcaatgtcatattttttgataaattgcagcatggctttgtcgtctccgtaatatccaccaacaaaaatgtacttgtcaatttggttcgcgtcgtacatggttgcgcgcaagaaggtcttgcaagtaattggcccgttcaattttgtgtccgcgcgcctcttcgaagcgaataattgcgtcggccggtgacacgcccagtttgtccaccatatagcgacacactaaatagccgctacggttcaatccatgggtgcaatgcacgccgaccagcatcgtcgggcagcggtcctggaactcgtcaacggcgctgaaaaatttttgcacagtgtcttcgtccggaatcgcgcggcctggcacgcggatctttttgtacaacaggccctcccgaatcatctgttcgccgtcatagtaacgcgtggtgttcgttaaatctatcacggcgcccagcgcgctgtgccgcgttagcagactggccactgtccaacggtcctcgtcgttggtcacatactcgaacaattccgcactcaaaggcaccttaaagcatatcagcctggtgccgtcgataacgcggccgcacggagtgaactcgtgccagcgatcggggaacattccgcgcgcccttacactgggcgactgacgcaactgtatgtatataaacaagccgccggcaatgctgtatgcatagtgttcgcaaccttttcgacagcaacatgtccctgtcttctaagcttctcgtgtacgcttattacggcgcgttcaatttgctgcacgaaaagtacggcgagtcgtaccatttgtacagaatagtgcacgaacatttgactgaaacgtatgtgtccaacgcgtcatgcgtgcgccgcgacattgccacggcgcgttgtttcgagaacgggttttgcttcaatctggcgcgccaactacttgatgtaacggatgtcgccgcgcgactggcggcgtggtataaccgcggcgacaaaaccggtctgtgcgcgaacgtgcagctcgcgctggccgaaatagacaaatacgcgcctctcgaaaagcgcgtttccattggcaacaacatttttgctctggatacgattgctgacatccctagcaacgcgctggacgattttcaaacaataatatatgaaggttttaaagattttgttgatatgaacaacctagcgcacgtcgcggacgtgttcgaccccgaccccaagattaaagcggaaggttggtggtactacaaattttgcgtgctaacctacatgcatcgattaaccgttaatgccgtgcctacagaattaatgacgcgtttgcaagacgcagtcatcaaatttgttcagccccaaaacaaaggcaactgcgcgcctgccatggccaacgtgtacggacgcttctgcggcatcggacggaaacacttttcgcaacataaagctgctagtatgtacatcctgtttcagtacatgcgcaacaacttgactccgaaagacgagcgccacccgtcttttggcgtgatcaaagatttcggccgtctatgcaaagaaacttatacagatctgcgcgcggaagccgatctgctctacattaacgctacgacggacgaaaaaaaaaacgcgctgtttgatttgttgtgttgcgtcaacgccgcggacctcgacgttgactgctacgactatattgtggacaacttttattttatatgtaaataaaataaatattcttttgatagtgttgttataattattatataatattgttcctgagcacgttggcttcttcctcgtcaatgaaaccgtgcgcgaggtcattgttaattactagctgtagattgtttctgaacgcgttggcttcttcctcgctgatgtgaccgtgcgcgagatcattgtcaattgataactgcaataattcgcgataatgcgcgttgctgttagccgcgccattgactcgcgggcccacgactgttttcatacgcggatgcaccaccgccaggttgaggtttttgctgtgcgcgtattgtggccccatcttatgcagaggcaggctactcacggcacgttgaacaaccggtgcagccttctccgtggcgacttgtcgcgggtcgtactcatcgagctgctttgcggtaaacagctgcttggattcggccttttgcagcgcgggcaaattggcaacgacctcgtactgggtaccctttagcgtgagcggaaattcaagcggcaaacacttgtacgcataatacacgggtgggccattttgctcgtggcgcacctctttcatcactatgtcgccgtcgtaaaacgcgttgctggcccgccgtacgctttaccggaaaatacgtggcttgttcgtcaatgtccatggggggaaatctagcgtcggggttcataataataaactcaggttttatttttatatattacgaaattgcttttttaacaatgtccttggcggcgttcacggtgcatttgacctcgataacctttttagacaaacgacgcattttatagccgctgttggcaaactcttctttgatgcaatgcacggccaacagcggattggggtgcacgccctcaaacatggtgtccatgtcatcctcgaactccaacttgcgcttacggaaatgctcctcttggccgcgcgcaaacgcgatttgcgtgttgcctgtatcttccgcgcggctcatgaacactgccagatgcgggtgtttggtcacgtcgcgcggaaacaccacgacgggcgccccctgtgtggacgcaggcggcgcgttgatctttgaatcgagcgcgtccagacgctgttcaaactgttcaaaacggacgcacacttcatgcttgaatgacttgtgcgcgctaataaacttgtcgctgttggcgttaagcgttttgatatgcttcagcaccgtctcgatcttgtcgcgcatatcgtcgcggtcatagcctttgtctgttttgatagccagcaacacgtcctccttcgcgtccaacggcaactgctgcaagaattgaagaagcccgtgtttcgttgcatacaagctaccaaaggaatccgtctcggcgggcggcgcgccgagcactagctcgttgaggtggcgcacatgttgcctattaaagctacaacgcagcaaaagatcgtggctaatttttaagcctttgcagaaatcgacgacgctacaacatcgattggcgctgtcgtccgtcacgtatcgaaacttaaacgcgaacgggtaacagcggaacacgtcccagcgcacaaggtccgaatgcgcgtgccggtcgaccgcgtaccgcttgtacgcctgctcatcaaactcggcgtttaaacgcagctgcttgtcggcgccactccaccagccgccgaacatccaggtgaacatgtttcaatgtgctgtagcaattgctgggtcaaacagcgcgaatactcgcctcccttataattatagctgaacggcgcgcgaatttgcttgctggcgttgcagaacacgtctcgatccacgtcgggccagtaatgcaatatcgacttgtcgtcggcaccgtcaatgtacatttccacggcctgccggacgcaataaataaaactgcccggcttgatctcgccgctgttcagtttgcacggtttattcaacatgccgaaccaatgctcgcgcaaacttttcggcgcgtccactctaaacttgccgcaaaactttagccacatgtggaatccgcggttgccgctaaacatgacgcgttgaacagcatcctctttgtcggcaaagaacagcataagcgcggtggcgcccacgtttacctttagcattaggtccgttttgttttcgtaatctttaaaatcggcgtcaatgacccactcacggccgccctcgtccaatggtagcacgtgcacgtcgctcaccgagtttttaacgatgtaattgtacaactgcgcggcgttttcgaaggggctgctagcgtgcacccatcgccgcgggctgatcataaacgcgagcctgcgactgtcgttgtacgcaatggctttccacatcatgtcgacccgctccaaagtgtacttgcacggccccattcagagcaacaataaaaacgaggtcagagctgcaatcgatcacactgctcagtgcactcgcaattgcaatggcttctttacttattgcattgacgttactcgcagcggacgcgcaaaccgcgaatattctagcggtgctgcccacgccagcttatagtcaccacgctgtgtacaaggcatacgtgcacgcgcttgcaaaaaattgccacaatgtaaccgctgtgaagccgcggctactggattacgccttgctaaatgaatgcggccgcatagagcaaattgacgccgacatgtcgttggagcaataccagaagctaatggccggttcaggcgcgttccgcaagcgcggcgtggtagcagacgaaaccaccgtcactgcggacaattacatgagcctgatagaaatgtttaaggaccaatttgacaacgccaacgtgcgccattttctagcctccaaccggacctttgacgccgtggtggtggaagcgtccgccgactacgagcttgtgtttgggcacttgtttcggcccgcgaccgtaatacaaatcgcgccgggttacggtttggccgagaactttgacgccgccggcgccgtggcgcgccaccccgtccactaccccaacatttggcgcagcagcttcagcggcgaggcggcgggcgcgctcagcgaatggcgcctactaaacgaatttgagctgctggcgtcgcagcgatccaacgagctgctgaaacaacagtttggtcttgacacgcccaccattcgccaattacgtgacaacgtgcaacttttactactcaacctgcacccggtgtacgacaacaaccgtccggtgcctcccagcgtgcaatatttgggcggcgggctgcatttgtcgcaggcgccgtcgcacaagttaaccgccgcgctcgagcgccggctcaatgagtccgtcgacggagcaatctacgtgagcttcggctccagcatcgacaccaactctattcacgccgaatttatacaaatgttgttggaatcgtttgttcaactgaacaattatacagtgttgtggaaagtggacgacacggtgcccgcatctgtaaaattgcccagcaacgtggtaacacaaaagtggtttgaccagcgcgcggtgctgcatcacaaaaaagtggtggcgttcgtcatgcaagcaggtcttcaatcgagcgacgaagcactggagtcgcgcgtacctatggtttgtctgcccatgatgggcgaccaatttcaccacgcgcgcaaactgcagcagtttggcgtggcgcgcacgttggacacggccgtcgtctcggcggcgcagctcacactggcaattggcgaggtgattgccgacgcggaggcgtaccgcgcgcgtatcgacgatttgcgcgccgttttggaacacgacgccgcgccggccgaaaaagccgttaagttcacggaacgcgtaattatatttaaacacgacatgactcgcccggcacgtacgctgaaaacaacttctgccaacatagcctattcggactattttttgcgatttccattgtaattgcatgaatcacgatcatgagtcaccgttgttattgccgtgttttttgccccgctccgcgattgcgcacttgcagcctttataaacgctcacttcccaagcaaatcattattgtaacgaaggctctcacagccgcaacacgtcgccgtacatatggagaccgcccaaatattggctccttacgcgccgccaaagtgccgcccgggcgcggtgtgcgctttagtgaaaaccgtcgttaccaccacgatgttttcagaaagcaaaaacaatgaagataaaatggcacaaatcattgcgcaattgcgaaaaacgcggctcaatttttcaatactgtctcaattgcaaaggaagcgcgtgcgcaacatgcaaaagttgatccgaagagttattgcaaccctggcggcgcgtttgagtacacgaaaatgtgccaaaaccaaacattttgctgtcacgatttgtaaaaaactcgtgtacacgacaagtgggtctaaacggtttgtggaacagcgagtagcaaaattgaacgcaattggcggcgagcaggtgtttagtgcgcagcgcgccgattgcgcgcgggaccggcggcgcattgcaaaggcgctcgcgacttcgttgggagcgggcgttaaggcgagcgtgaacaacaagcgctttgaaatcaaggacgcagaaaagatagtaagcgcaaagttaataatacaacaggttttgcacgatggatatcaccgtgacgctggtgccaattaacttgcgcggcgttgaggagccaactcataaagaatgcttcaaactggcgtcggtgtgcgccaacgccgaattttgcctcaccgtaaagtgccgatcgccgtttgccaaatataaagtattaatctcagttactaattttaaagaaaaacatttgcaagccaccgtgtgcagccgttacgacagcttgtgcgtcatcaacactcccggtcaacagcagatattgtttgacggcttcgccaagcccgacgatgaaggcgccacggtaccgcttgtggttggaccgctgttcgctgcgcgctccgcgggctgccgtgtgcgcgccgccgtaaacgccatcgagcaacagcaaaccgtagtgaaaatttttattaacgaggcttatttaaaaagcgcctggggcgcgttgcgagggttattttttagcgataatgagtatgaattaaagttggtaaatagtgtagtcgaatttgttagcgtaaacaaagctcataatagcgcaaggggcgccaattcctcaaaatgggttcctgcaagtaattataaaacgggtagacaattgttaactgtattatttatttttagattttactaattaaacacggatagttatttatatttataataaaaaaagtagttgtgtgaatttgattttttattaaaccaaagttacataaactaaagttacaacaaaaagtgtataaattctttccacctaatatcacaatccttatacgggtaattgacacaattagcgacgtagtcaggtacttggttggtgaacgagtccgttttgaaataggcgtatacaagcttgcgacaccccagcgcagacccgtggatgtccagcgtctttttgcaaaaattggtaatactttcgtcgcaacgccgaatgggctccacgtcgtgatggctgttgatgcattcgtcgtacgctttttgaggcagcttggcacgcaaggcgcaaatgcacgctttgcgccgcgccactttaaaactaggtttgtctgtaaatatgtctttgagcagacacataatctgatcgttgagcacgcgctgtaacggcgatacgaccacgcggtagtctttgccgaaaatggttagcgttttggtacaacgttctgtcgaaaacggcgggcccttcattgcccgtatgtttacaaaaaacacattgaattttacggcgccgcggtccacgattaatttttgttcggtatgctcatcgacaccgccggacgaccacatttccacctgcagcgcaaaccgcactaagtcaaactctccgttgaagttagtgcgcaccgtctcaacatgcggcgacaggcggagttgcgcggacccgttaaagcaaaacgcgccgttttggaaacatttcaaaactgtcaaatcatcttgcacgcgcacatttttggtcaattgtgtcaaattttcaaaagcgccttgcacgcacgcttgcaaccggcgttgcaagcgcgccaactgcaaccattctctagtaaagttgtagtagtcaaagtctagacacttgagcacgccgcgaccatcgtcaacgtggcaggccgctgccgcgccgccgcttatcacaaacaagccgctcttgtcggacaccacggcctcgaaacattctttaaaaaattccgcgcccgccttagcagctatgcggctgcgcaagcaatcttccatgtttttgatagtaatgtaaggcagcgttcccgaataaatttgatttgccacgcggtccatggtaaagcgataatgcaatccgcacgtctgaactggacaaatgcactcgcgcaacagaccgtttcgatggtcgctgatgcaggtcaccacctctactgtgaacgggccattgcatttgccatctcggccatgaccggcgacaaggttaagtggccgacgttgcttaacttgttcgacctggtggtcacagtcgaacgaaacatgttcaaaaaaagtctagtgctaaacgggctcgttaatttttgtatctgcaacggtgacggcttcactgtgcaacaccaactgcttaatcgggttttagaggttttgattgaaaaatattattaaaatacttgtttagtttgtataaaataatttaatattgatttaatgtcatataatacaattaaatactgaacgactgtaaacaatactatttaaaaactaacaatacttaaaagcttaactttaaaaccgggcgagagcgcgcaacaataggcgctaccggcatgggaggcgggataggtatggcggttttccgaggcactttgtatattgctttgggaatgtcgtaatgtgccgcgccgattccgctgtcgggcgagcttggggacgatgcggccttctcttcggccttctcttgtgtaaaagagctaattagcgggagtctaaaatcctcttcatctgccttcataaacgagctaataggaccctcaaagtttacttggcggttctcgctgacgatctgcaacattcttatgttgctctggtgctcgtcttctgcgctgtcgtactcgttttccgcttcgttgaatgacgcgccaagtctgttctgtttcacgcgggcaggtttgaggcgctgcatttcttttctttgcacgtacatgttccagcaatgcacgacgattgtgagaagcaccaacataattagcgcgtattgattttgattaaaaacagtgggctcgtcgtgtttgatctcggtcctgcagcccacgcactttttaaaaaaattatcctggtacacgcaattgcgatcggggtctatggcgttggcgtcgtgcacctcgtaacttagaaacgcaatgtttttccaacacaacgaatgccggtcgtaatccctcgccagcgcatccaacacgggcaggtgcccgtttttgtgtatctgcggctgaaacacaacaaaaagcacccagcaactcaacgccatcaaatgcgccagcgcaattattgttttcatgtaaaaattgctgtgcatttccgcccgtttgtggcacagcaccattttgtacatggcccaggttgtggtagtgaacacgtacgggcccagtaggaacgccgacaaaatggacaggttgatgaccgagtggctcgagtcctccaattccagcaaaaccgcgtaccgatcgtttaccgtgcccattaacgaaaacacgaacgcgcccgaacaaaccgcgtagagcgccgcgtgcagcaccagctgcagaaaataattaatttgcaccaacatgctcaactactaagtatcaacagcatgtatcgaatactgattgtgcttttcctgtttgcgctgctttatatagtcgtgtggcccttttatcaggcttataatcacatacgatatgcccaaaaagattacaacagtactttgaccgataggatagagtacatcgagaaggtcatgcgacgcaggcattacgtgccgatggaagcactaccttcagtgcgcttcgacacaaatttgggcacgttggccggcgagacccttagatgcatgtctgtacctctctacgtcagcgaaatagatctgcccttgttcgactgcagcgaggtatgtgaggacccgggcgcggtctacttttttgttggcgaacacgacacgtacgtggttaacgggcacaagctggcggtaggagggtattgcaccaccaatagcgtaccgcgcgattgcaaccgcgagaccagcgtcgtgctcatgagcctcaatcaatggacatgcatcgccgaagacccacgttatttcgccggcaccagcaacatgacacagctggcgggacgccagcactttgaccgaatcctgcccggccaaagcgatcgcaacatcctgttcgaccgccttttgggccgcgaagtcaacgtggccaccaacacgtttcgccgcagctgggacgagctactggaggacggctcgaggcggttcgaaatgcgctgcaacgcgcgcgacagcaacaacaaccttatgtttgtcaacccactcaaccccctggagtgtttgcccaacgtgtgcacgaacgttaattttgtccattccagcgtgcgtcccctgttcgagttgggcgagtgcgattgcggcgacgagaccgtgacgcgcgtgcgtcacgtcgtgccggacgaccgcgcgtccatgtgcgccagcattgtggacggcctggacgccaacacggcgtcacacacgtttcgcgtagagtgtgtcaacacgtacactccaatcgatcgtttttccagcaacaaacttttgtgtcccagcgacacgttcgacagcaacacggacgcggcgtttgcattcgaggtgcccggttcgtacccgctgtccgggaacggtctggacgagcccacccaccgttttttcctggacacacggtcccgcgtgcagtacgacgacacgcgcggcttactgactcgataatgcttttatcttatcaaataaagattgtaattggagccaatagtttgttttatcgcgcattgtaagcttagcgcgttggcttgcaaattcagttgagttccggcactgacatggcttgtctgctagcgtgcattattgtattgtttggttgcgttagtgcaaccaatttaattagttttgaacctattgacgatagcgcgggtcttgtgtttgaacgtgtaggcgcgctccgccacgtgaccgagcaacgcttcttgtttgtgcaaaccatcgactacgatccgctgctgcaggaactcacgaaaatctccgacttcgtgcgggacacgcgcgacaacgcgaccggctgtccgttactaaagctgatcaagccgggcaaaccgcgcgccaccatctttcgaattaacaaacacctggcctcgttgacgcaaataaacaatgagtttgtgagctacgcgctaaactcggcagatcccataaacaacgaggtggaaattgaatttgattatgtggacacgcggcagcaagacaccgctttcgccgacgctcacaatccgccccactggagcaccgttggcgccgccgatatcaaagcactgctcgcagcgccgcctccgcgcgaccacgccaaagtgctgccgcgcatctccaccgccaacgtgacggataaatatttagaatacgaggcatgcatggacgcaaaccgctccgccgaaaacgagtgcttatacttaacagaaatgcacaatgccatgagtcgtaagctgacggacgccgcttctttcgcttacaccttggatcgcctgatcaagcaaacgcggcgcaacaaattaaacacgaccaacaacgtgctcgacgatggcgcgctgctgcgcgagatgcgccaattgataaaagtgttggccgcccgcaacctaagctgggttgtaaatttcgagcgcgaaatgaacgcgcggttcgacttgtcacaggcctacaagttgcatttgtacgcaaacaagaacacaagggtgttgtgcattgcaatgccgcttgtggacacaacggcgttgcagtacaatttgtacagagtggggacagggccctttttcaggggaaccatgtgtttgatgatggttccggccgcgagccacgtcgcggtgaccgacactcgaaatttttacacccaggtgccggtcgaatttacaacgcaatgccagcacttttccggctacaacgagtttttgtgtccggcaagcccgcgcgtcgccactttcaactcgggcgtgtgtgaaatcgaaatgttcatgggccgccacgcgaacaacttcgactcgctgtgcgacgtgcgcgtcgcggataacaacgccaagcaagttcttttgggcattttggtgaacaatcgcaagtggatttacgcattctcaagcagcgccacaataaactactcgtgcgacgggcactacgacgcggttgtaaacgtgccggcaggcgtcggcgtgataactgcgcagtcgctgttgatttgttcagtgcgcgtcaacaggggtgcgctagtgtttaatgttgatacacggtcatacgtaaccgattctcgctcttactggccgcgccaccgtttcaattacaacgactacgtggacgcttcgctgctcatgcagacatctacaccgtttgccaacgccgtcgctgacttgagcgtgcaacaattgcagacgctgcgttcaagattttacattcgcgattacactgcgccgcccaaaagctttttttcaccgcgccgcaacgacgtggattcgcccgagcttccggtgccaaacgagcacaacattatcgatctagtttctgtgctggtggggatgggcgctgtgagcgtgctttgtgctattggagcctattgcgcgtttaaacgacatcgcatgcacaaacgctgttcggtagttgtttcgttttccaacgacgatcaccagcccatggtcgccatatcgaacagcgcgcgcgcaaacatacacttaccccaaaacaacgcgcctaaatacgagaaggcgtttttgtttccaatggaaatcgagcgcaccaacaataaattagtataatgctcaaaagccaatgaatgtaaaatttttaattaatatatgtatatgagtattttgtgttttattttggccagtgtgcgtaaaccctaacacagtttgcacgtgcgcggcgtttttaagtgcagatgtgcaaaatgcgcaactcggcgggcctgtttatgattatggaacccgacaaggccgtgttgctgtgcgcgcggcgcgcctaccgtggcaacgccgttgccagcgacacgttcttggagaaaatttctattccgcgcgggcaccgcgactgcacggacgccaaaatctacgagacggcggtgcgcgagttcgtggaggaaacgggccgcttttttcacagcgcctacatttacaagtttccgttcactttacactggacagacgaaggcgtgacctacaaatactctatttacgtgggtgtggtgcgcggggcgctagctgacgtcaaatataagcccaacacgtatacggtcaagctgttgccgggcgcgctgggcaacgattaccgcatcgtgctgcggccccgccgtttcaactgcgaaatctcgcgcagcctggccattgtgcctttagaccgatactttgagtacatgaacagcaagcagcttaacacgtacgcgtctagcaactacagcgagttttttgattttgtgcgacaggtcaaaaggctattcgatatcaagcaactgcacgatttttttcacgcttcgttggaacgtgtgtagcctggcgatgcatttgcgtgcgctcgaccacaacattaattgtcttacacggagtgaattgtacgcactgtgggccgaagcggtgaacacgttgaagcgcactttgcaagtgaaaaacgtgtgcgcgcatctcttagaagctgacgccggcgatgttaaagattatataagagcgaatttgagccgatttacagtaattaccggcaaatgttctaagcgcaaggtgtgcaaccatcacagacggattaaaaggaccttagagctcaatttaaatctagtaaacgagtacgcctgttccgtgacggacgtgtatcgctctccaaaatggtaaatctacccgaagccgtgcacgacgagtcgtttgccagcaacagcgcctcgctatttaacaaattggacaacagcgtatttaatagaagcaactttgactacctaagaacctgcattaatttctttgaaaagaaaagcatgaactatacgattattgcgttgccatgctctggagatgagcgaaaggccacaaagcgccctaaaagggtgaacagccacaacatgtacatattgtttaacagcttttacaccaagatccgcaaacccgagtggcccaacagccccaccatgtgggacacggtaaaagcgcaaaaggaattggcagacttcgtccgcgtgtttgaccacgcgcaaaagctgggcaagaacatcacttttcgttccgcgtccggctcttcgacggaaacgactaacaagcggcggaactccgtggcacccaacgtggtcgatttccacgaaaattgcgaacagcgcaacaagttgtactgcgagttttatagcgtgctgaacgagacttttaaaaatggggtggcgcccgcctccagcaacatttacgacagcgtaataacgcgagaattggtcaccaaaaatatggagatgttcaagaacattgctctcaagctcccctctgcaagttacgtgcccacgcccgtgagcaaaaaacgccgcgcgccgcctaccgcccccaagaaagttgccgcgaagcaacgccacgacactaagccaactccgtcgtacgtcagcgacaacacagaagacaccaacatgtctgagtaattttaataaaactcgttttgaattataatattttattgttttcctcctcgcaaccttaacaccatgtgcaacgtagactccttttgaatattgtaatccgccattgttttggcgtcctccagctgtttacccgcataaataagtctctgctgatccacgggcacgccctctttgtcggcaattttctgttttacctggccgacagtatcgccaggctccgtttcgacggtaatggttttacctgttaaagttttgacaaaaatttgcattttaaatctcttataaatggcgcttgtcaaaccaccaccgccgcccatgaggtttattgctcaccaaaacgggcgtcttcaaccccaattggcaaagctggttcgggcgcgcgagcggcgctgtttcgaacacgacattggagagttggcggaaaaactaaagagtcgcaaagtgtcgcgcgggcaccttggtgacgtgcttgaactgatgggccgtcaaagcaaactgttgcccgaattggtgaaaaacgacgacgagtttcgcgtcgtgcaacagcgcgatcttggacacaacactatcgaatacttgaactttttgcagcacgacaagctcttctactgcagattatgctacacgcacgccgattggttgtggtgcgagtttcataaaactcacgcctaccgcggtcagcgcgacatcggcgtggacacttacgtggatcatttaaacagtgacatgggcgtggtggctcttgtcgaagaatactaccatttgctggctacctgcaacgagaggcaagaagccaaacgcgtgctaaaaacgcttaccaactttgagtcactgaacgaccttttggccagctacaactattctgatacagacgcagacacgtctgtttacgagttaatggattttgaatagtacacattttggacgtgcgtcagcgccgacctcgcttttcgggtacgggtgttctcgaaaagcgagtgctatctttagacgtgcgtcagcgccgacctcgcttttcgggcacgagcgttatcgaaaaacaagtgctatctttaacgtgcgtcagcgccgacctcgcttttcgagaacgtctgtacccgaaaagcgagtgctatctttaaacgtgcgtcggcgccgacctcgcagtgctatcttacgtgcgtcggcgccgacctcgcttttcgagaacgctcgtactggaaaaacaagtgacgtgcgtcagcgccgacctcgcttttcgggcacgtctgtacccgaaaagcgagtgctatctttggacgtgcgtcggcgccgacctcgcttttcgggaacgagcgttatcaaaaagactgagaatggtaggcatattttcaaaatgcaatctattacataacaatgcaaacagccttgtatcgcttgtataaaaggcgcgcatccgttgcacaaaattaaaacgcatcatgcaccgacttgcattagtcgtggcgactgtggcctccttgtgcgcctgccggcagttggaccacgttaccggcacacagcatcttgtgcaagtgttcatccacaaccaatatttggccgtacggtctaacggcaccatcggcggcacaacgcacgggtcgatggacactgtgctgcaacgcgtcggttttagccaaggccgcatcttgctgcgcaatgctatttcgtgcatgcacgtatgcttgaatcggtgcggcgctatgtacgcttccattgcgctctctagcgactgcatcttaaacgaagttatgcttgaacacaattacgacgctatgtttaaaatttacgacggcaagaagacgtacgtggcgttaaacagagatgggaaaccgcgccccgtgcagttgcccaagcgcagaccgttgcgcaacttaagaatctacgcgtttattatgcgcaaaccgttaaactacaccagcgttatacagtgcccgaagcaaacgaaaataataaaacaccaaaagtgccgacttaggtaatttactattttgttcggttacaacagttgtactgagcacacgctttttttgttgtaatataaatattaaaatgtattactacatagctcgttataaaagagaaactgtaaaaataaattgtaaaagtttataaccattgtactattgtttaataaaagctgtattttcattgtgttgttttaatttgcgcacattgcgataatgccgcagcccagccggccgcccgagttgcccgtaaccttgctaagcgggtggtctgttaagccgaggtcatcgcgatccgtgtgcactaccaagctacgacccaatatgctgagcggaccaaacaagctcatcacgttgtcgctcatgtcgacaggcgtcagcgcggtgcagcccgcggagcggacgttgcccagatcgccgacgtgccgctctgcggcgtcgggagcgccgtgattttggtgcgtagggttaaagtgctcgccggcggacgtgcagccgttgctggtgtcgccgaactcgtgaacgtgaaagccgtgcagtccgcgcggcaggttgagcagatggcccgtgatgcgcagcgagtcgttgggcccgtcctggttaaaatacacttttccgtgtgcgtcgcccgcgatgacacaaatggctttcatgtttatttaacttatgttaggagcaagattgtgggatgtattaggagtcgccatgtttttgtacaagatcaaaaatataattgcgaccacggccacaataactgcaataattgcgtacaacaaaatcgggccggatggcgccgccaccgccggccgaaacctaagcggcaagtagttttgatattcacgcaatagaatttttttatcctcatcatcgtcaaattgattcactgccgcgtatatagaatcggcaaacaaattgtcgacgttgaacagtcgcagctgcgatttattaatgtaatccacgcagttttttattttggtgagcagacgctgtctggccgtatgcgcggcgtctatacctcgtcgcgctactccgtaccgcgtaaactcgtaatctactctgtgggtatcttgtaacataaaattcatgcgttccatgctggcttgttgatggaaaattgtccacgcgtaaacgccgccgattttcaagtcggcgtacacgtgttgcgtataaggcatgtttcttcccacaatacggaactcatcttccactttgttgttgtcggtggtatcgaagagggaaaacataacgtaaattgtatcgttgtagttccaattgacggaagggttgatagacaatatttttatttgcttgtgtatgtaatcgacgcacaagaagcccccatttcggtcgttaaggccgtaaaagcgaccaaattcgctactcaaaaacgagctattctgtgcactatagtgcacgtggcattcacaacaatagtttttgtgcactaacaggtaattttcatagttgctggtagtgatggtgtaggtgaggttgcccctaccgcgaggcatgaacaccttgtaaataccgctcaccacgcgaattgtaaagcttggcgcagtgagccgaaacgagtgggcaatttgcgcgcccgccaccaacgacatggtctggcctgcaatatccccaaagtcggcaatgtgtatagtgatagtcgcttcgcccgtggcgttggggtcttcgtggatggtttttagcgccagcggtacgggcgcgtcggcatcaaacaagccttggaatatgacggccggtctgtctacggcgaggcggttgcgttctttgagctgccaatcatcacacggcaacagcattgtgctaaacaagggcacaaggtccagttgcgaaagctccgcccaccacgtttgcatgggcggcacaaagtggcgcggcaaaaagtgctcgttgccaatgggttcgccgagttggtacgcgcgccattcgcgattgatgcgagcaaacacgccagcatccatgtccatgatgtagctgaacaccgctaatttttcaaacaaattatagctgtcaaaaactttgccgttttcaattttgcgcacaatattgcgccccatggtgaggctattgggcgagttgaccgacttttcgtctagctccaaataacgactttggtacgcgtcgcacaaaatgttgttccatacttcgtttagaggcacgggcccgctgcgaacgaaatgaaaatcgtacgcgtgtgcgatttcgtgtagtccgccccagttggtgggcagcggtctgagatagaaatgctctacggacgaattgctttgtcccattgttaaattgttgtaataggcagcacccgagcccgatatattggctttggcaaaaaagcgcttgttgacatttttgtcgcgaccgcgatcctttggcacggtcgcgacgtcaacgtccaaacctattaacgcgtcgtaaaaggtgatcacatcttcgtaccacgccaatattgaatcgatggtgaccgcgtcggctagcacaggtctgtctataaacggcaccaaaatttgaatgtattttgagcttagcaacgcaaacggcgccttgtcgggccattcgaaccggtcagagacgccgtgagtaaatttaggcagctgtcttgtggtcgatgcccaaatttgcgccgtgtactcgttgccgttaagcaaacactcgaaaaacggcacgctatcgtgttccactacgtgctcgaagtaatcgtctgggtcgctcatgtcgtgcgcggacaacgtcaagttttgctcggtttcactgtcgtcgttccacaaattaaacgaaacgtcgttgtgggagactttaacgcgtatcgaatcgccggcgcgcaagtatatgccgcagtcgtagcgattgtggttgaccgccatgaacatacgttcgtttccgatccacgccggtactacggtcggaggcacttgtataggtatcattatggttgcttatattacgcccactaagctgggtgtgcaatacgcgctagcgtgcgcagaaactggccgaaactgtcaaaacagcaatgagttctgcagcagcgcgtgcgccgatgcttgcagctaaagtggcaccagttttacggcaacgctcgtaccagaaaagcggggtcggcgctgacgcatgtctcaaattagtactcgctttacgagaacgcccgtactcgaaaagcgcggtcggcgctgacgcacgtctcaaattggcattcgctttacgagaacgcccgtactcgaaacgcgaggtcggcgctgacgcatgtctaaaaatagcactcgttttacggcaacgctcgtaccagaaaagcggggtcggcgctgacgcatgtctcaaattagtactcgctttacgagaacgcccgtactcgaaaagcgcggtcggcgctgacgcacgtctcaaattggcattcgctttacgagaacgcccgtactcgaaacgcgaggtcggcgctgacgcatgtctaaaaatagcactcgttttacggcaacgctcgtaccagaaaagcggggtcggcgctgacgcatgtctcaaattagtactcgctttacgagaacgcccgtactcgaaaaagcgcggtcggcgctgacgcacgtctcaaattggcattcgctttacgagaacgcccgtactcgaaacgcgaggtcggcgctgacccatgtctaaaaatagcactcgttttacggcaacgcttgtaccagaaaagcacggtcggcgttgacgcacttttgctaaaaatcgcggtagaaaaactaaaagcaacatttagcaaatgatgtgattttgttgataacgaaaaaatgtaaacgagcgataattacgactaagggtatctagacaatcggtaattaattaacacaaataaaataatgttgtatttttattaaaaaatgtaaaatgttattatttaaatctggtacatgcgaacggcagtttccacggtgacacggcatatggggcaattggtcaatgatgacgcgcacttgccgcacgctaccacatgcccgcacggcacgaagcacacgattttttcatcgtaatagcaaatcttgcaaagcttttcatcgggcagatttggttcgtaaaccgtatgcttaacaacttgttttttggttgtgtcgcgaattgcacacgattcggtcacgaccttttgtacataatcgcggcccttgacaagtagtacgtatgcgcagcgcccgaaccaaagcgcgtgttgttgccacggctcgtcatcttgctcccagttgtccaaaccgccgtcgcagtaaaaacatttgactttgtcgctacggccggtgtaaaagaagccagcttctgcaagtttttcgggccgttgcttcaaaccgcgtggccactctgtaaatgtgcgcaaacgcgcagcttctatcgcatatttggggtgcgcgggtggcggagagggcagttgatttgttgcttcacgttcttgcggcgcgtgcaaacctgcacgttcttgcggcgcagacaaggttgcgccgctcctacgcaaaaacgggcattgcggcgcccatttttgatgatcgcgagccgggtcgtcgcccgcctcccagcgcataatctccactttgcaaaacgcgcagcgcacttcgtcgccgcgtcccaagtagtagaacccattggcggccatttgtcgcggcgacataaattctaccgtccaatttgtgtacgtggcaagacgcgcattttcatcttccatattggctttgtccgcgacgaccacagtctgttcgttcattctgcaacgcagtgcgccttgccggtttgacaagacgaagcttgtgcgctgtgtatttaaagaatctctaatctaaaatgataccgcttatcgcgcatcgcgcgccagaaccggaactacaagtgctaataatcagtatgctggccggcctgccgacactgacgctgctgctttgttcgccgcaaatgattgtgcaagcttgcgcgggggccggcggcgtgtgggtcaacggcacgctacaatccgccgccgtcgcgcacgaggcaatgcacagcgcttgtgttgcgtttgccgtattggcgttttcgctcgggctgctgttcgataagctgaccgcgttgccgccacgctgccccgccgcgctagtgctgtctgcactaatattttgcagcgaactcatcctaattgcggcgataattagggtgtgtgccggcgcgaccgtgggcgctggcacgctcgtcgctgggcgcttgcaggctgttgtgctagatgattccacattggtatgcgcgctgtacgccttaacggcgttgagcgtgctgcacgtcgcacgctggcttttcttcggttgggtgacgcttctagaatgccgcgagttaatgccgttcgttgccaccgccgtcgtggccacggcgctgtacataatcgcgcttttgttggccggtctaattctccccactaacggtttgcaaatgttgcgtaacgcgtcagtggcatcgtgcaaattaaacaacggcacgtggtccacaatgtctttgcctaatttaaaataataaacaaattaatataaaagcgttttatttattacattatttatttttattatatgtcacaagtttcgttgtaaaaattgtacagcagcgcggctaaaacacagctgccgcgcaaagcgcaactgcgcaatttcctaaaaaactcggcatccagtttggtcacgtagcacaccacatgtattgagtcccaacccttctgcactattgacttgtcgcatttgtctacatgttccatgtgcagtatccccacaaattttaaatctttgtgcataaactgcatgcagcccaatccgtcaataaaaggcaagttgggcgccggcaagtatttcgctagcgtggtgcgcacggccgcatagttgtcgtcgttcgcaccaagcgtcgaagcgattcggtacggcacgtgcacgctgtcgctgtacaattccgcccacgccaagcacagatcttgaaacatttgctgtccgaatagcgtctgcgcagcggaaaacaagttgttgcgcaaaaccgccgcaaacgccgcggcctgcagcgcgggaactcgcttgaaaggcatagaaggatttcgtttgcaactactgcgatagaggttgctgggccgcgcgggttttgacatggctcctacgcgcgcgctgcgtttcgcgttgaacaaaaaagactatgcgcgtgttgcggatttggcaatgtcatcacgcgcaaatcgaacctttttacttgattaccgggatccgaatttttggacgcgcgtgtcgcgcgtctgctacaaccgcaaccagtttttaacggcgtttcgcgacaaattaaactgggacgaggtttcggcgagcccgctgaccatagccacggctagagagtttgtcacaaaactaaattgggcgctcgtatcccgccaaacccatttgcgacaacagttcatctacgagtttggcgaccgtttggatttgcagatcgtgagcgccaactacaacaacctgtccccggcggttcagcaaaagttcgctgccgcgctgaactggaattgcgtggtgttcagccactctatgcttccagagtggtttaaaagccccatttcagaccatattaactatagagccgtcgccaaacacaagcaccttgacaagtcatacatcaacacgccgcattgcatcaacaaaattgacttaaacgtgtacatgcgcgacataaagaaaattagcgacgtgttgattctttattgcctgcgcgaggggcgcgtgcgcgagcttgaattggtttcgggcaacgtgccgtgggccgaccacatggccgtgttcgacgaataccccgggctggccgacacgttgcgcttggactgggctaccgtgccaacgtggaccgctgcctgcgcgccaccggcgtactactttcggaaacgcatgccaaacgcgtttgaacgcgagtttgtcaattctgtgtattgggacaagtttatagaatacgcttcgggcacgacgagcgtggccagtgccgcgttcgccctgctgctatttgacaattttaaatcgcgcgtagactggaaccggttgcaggcgagcgacaacttcatcaacctgcccgcgctgcaccgcatgcacgggccgcttgtcgcgctcggggcggtcaatgacgatgacagagtgtggcgtgcgtatggcaagtttgtacgcggcggcgagtgtgtggcggccagcgaacacatcattccgctgaacatgagcgtgcgcgacgcgtatcacaaaatggcgctcgtgcaggcgtgcgcttcgcagcgcgaacacgacgaagcgcgcacctgcgagcaacgcatggcgctcaacggcggcgaggacgcgctgctgaactggaacatgctatctgccacgcagcaggtgtgcccgtttaactggcgccatttacaaaatgttaacgcgcgaacgtattggcgagacaacccgcactatgtgcaggacgtgtacgaaagaattattgccgcccagatgaatcttgattagtttttgtgggataaaagagatgaaatttacgccagatgcacagatttcgcaaagatgttttgtgtgaaaggcgacggcgagcgaccgctatcgcagcagctggaccatattaacatgaccaaacgaaaaattaccgttgagagtcagcattttgagaagctatttaaagtgacgaaaaacacttccgaattgcgcgatttgcaaaagcgcgtcatggactctagacaaaaatttctgaattttggggtaaagcatttctaataaaacgcaacaaaaactttaagtattttatttatttatttcttgtgaattctaaactgcgcacggtgtaagctcgccctcttcttggtcgtagccgtataccctggggtaatcttcaagctcagtgtcgtttgcgcgtggcgtcgacgtgcggggaagtgaccatgtttcttgtcggggcgaagggcaccgtttatgcggccgacatcgaaagcgactgccgtccggccaacaatagcgctcgctgcagcgctgcaagcgattgaacacgcgttcatcgcgcacgcgcaaacagcgccgagagcttcggcgccaattgacgccccttttagcatcgcaaggaaacgccgcggccgcgcacattagcgcaatcagctctcgcgaaaaccgcttgctgtacatttgcccgttgtaatgtaattccatcacgccacaaatatttttataaaatcagccacgtcctgccgacacgtcgggcatttgctgtctagcccaaagtagcattgcatgcacacgcaaaagtgacggcagggcagaagcacggcatctcgcgggcgttcaaggcaaaccttacattccaacgcctcatgtacagtttgcggaggtgcgaattgttcgggcgccgcctcggcggagcggacccaatcgccaattccgtcgcctttaatgcacactacaaagtagcattgtgggttcgcgagcgcgtgacgctgccacgggtcgtcgctcggcagccaatcgcgcacgcggcagtcgcagaaaaagcaggcggtctcatcgcccagcatggtgtgaaacatgcctgcctccgcgatgccgtgcgtgagggcgcgtaacgctctcggccaataatcttcgaaggtggcgcggcgcgcgctggggtgcgccaagcggctgtacacgcaacgcggtttgccgggcgacaccaccacggcgttggtactggcgtgctcgttaaagcgctcgttttgtgcaatcctgctggcgtatacgcaatatggcgacagcgtggcgtgcacaaattcgacgatgtcgtcttcgcaccagtttttaattacaacgccgcaatactcgcacaccactgcgtcgtcaacgtgcgcgtaacgaaacccattcacgattaggctgctaacaaacgcgtcgtcgttaatgggataattttcaaaggagttgtgtctctctattagcatgccaaacatgcgctcggtgctgtcctcatgatcgcacacgttgatcacgtataacggcgcgctcatgttgccaacgtggccgaaatcgacaaagtgtcgctttgatcaagcgacacgttaatgtggcccagttttcgccgcgtctcggcgtcgacaacgtgtacaattgacaggtcgtggtcgagcaccacaaattcgtagtcgagcacgttgcaaatgtaacgcctttcgttatcaatcttaaaattaaactttttcagctcgtctattgcgtttacgcgcttgtctatcgctccgttgcttaacagcttgagctgcgcgtaatggtgcagtttaaagggagcgcatttggcaaagttaaacggtaaattttttaacagatcgtcagtagtgaacgcaaacgcgccgtctgtacacgcgtttggcgaggcgtcctccatattttataaataccttatatctgggcacgcgcactcagtgacagcacaaaagccatggccgccaaacgcgcccactccgaagacgacgcgcaagagagcaagcgagtcgcgaaagagacgcagttgctgccgtacaacagtagcggctttactatgcaagtggagaacgacggcatgttgcgcaagtttacgcccatcaacgccatgcgcacgcaacagaacttgagctggcagcgtatggtgcttgtcaattgccaggcgctcgatttttcggcgatcaatttccactacagcgacttgcaatatttgaaagacaagtttacagaattgcaaggattgtcgagctactacgaatggcgcaaacaagagcagcccgatgacaaactgtgcataatggaaccggcagtgggcaaatgcacctacacgatcggtctgcgcgttaaaggccgccccaacgggttcgccatagccgagtttggcagcgtgcaccgatccaagagcacgtacggccagtttttgagcacgacttggtccgccatccacgaacacaacagcgtttttggaaaagttatggacaactactacagatacgagtatccgctcaagttggagtcgagcgtgtgtgtgcatctgccggagaaggagcacgagcgcgaagccaaagcgcgccaatttttgtgggtgcgccgcgacaacaacccggaattgtacgctacggggcagctcgaccggccgctggaggtggtaggcatgacgctgagcgaattcgacctcttgtttgaaattggcaagaccgacgggccgtcgcaagaagtgccggtgctggtttgcggccgcatcgatggcgtcaagtacggcaaggaaatccaaatgactgacgtcaacgggcgcaaatttagcgagaaaccgtactcgctagcgtttaagcccgtgctgtacctcattcttgaaccttaataagccaaaatggagaccgaccttgctgcggtcgtgcacaaaaagcgcgcactcctcaacgctgcgcttaaacagcaggacaaaaaggtcgccaaatattttgttaaaccatgcgaaaacaacgccgaaaaaatgttgatgttgaccgccgacattcacggacaggtggagcagttagaggcgttgctgtccgtggcgcgcgcacctcgcgccgagaaacttgcgttcgcgcgcgactgctccgacttggacattgattcgcaggatttgcaacaaatgtgcgcgcgcagcgaccttgcctattttgccaccaagtacgaggctgccaaagtgctggcgccgcacaaggccgcttacgacagctttttgaaacatagcgagcgctttatagacgcagtgcgatctttggacgcgcccaataccaccgccgattatttggctgagcgcaaatgcgcggccatcaggcatttgtgcactttagagtatttggtcggtttacacacacaataaaaataaagtttatacataattatttaataaacaaacacaatttagcacgtgttttattcaaactgcaccaggcgttggccgtaatgtgttcccgttcgcacgcgcttgcctcgaatgtagtcgatgccaatttcgctgtcgcactcgacgatgcggttttgctgcgcggcgcgctttatggagtttaagcggcgcgtcgccagctccaacgggttgtatagcgacgacttttctagtgtaaacgaattgaggtggcctttgttaaaccattccagcgaaataataatgtacagcaaaaacatggtagtcttgtcggcgctttcaaaggcgtatttgtttttcaaacaataatagtaaaattttagcgaattgtacaggtaaaacataaagttgttggcccgcatgtagtactcgacgtcggtggcaaacaacaggttcacaactcgggtttgcagtaggtgggccagtttgcgcaaataaagcatcgagtttttgtcttcatctacgcaaatcaggagcacgtgcggcgtgtgcgaatttaatactagcttaaagttttcgtccttcagcgcctgcacgacggcgctccaatgcgccgcggccacttccaaacatatgtactttttggataacacgtgccgttttatgatctcgctgacggaacacagcgacagcaaatacttttcaaacgcggcgtcctgccaaccgcgcacgctggccggcggcgccgtgtcgggctggtgcttaaagtccaggccgctctggatcaacttggtggtaattaaaatgctcagctgctgaccaagcgtataatggtcttcgtatccgcgctcccacatgacgttgcatacaaacttgatcaagttgtccacgcacggctgcatcagcatgcggcgcagccgctgcgtgtcgcctttgcaccagcggtcgtggcacgcgagcttgaacatggctgcgtcatgcgcgctcagctcgggccgcgtcacttctacaaagtcgtccacatcttggggcgtaacgtgctccacggcggtcaggcacgcgatgcgaaaaaccttgacttcgaacacgaacctcacaaacccgtgcgcgtcaacctgcacattacgcaccacgcgccgcggcagctgcgcgtctacgccgctagcgtatagattatacgacaaaaaggtttcgtcgtgcgcgcgacacaccgccggtaaaaattgcgtagtgaagtgcagcgactgcgcgaacatggagtcgctggccattgcggacgaaaaccagtttcggacgcggctggcctacgtggccgacatcgcggcaatgatgcgacgcacgctagactttatggccgtgcacggcgcgtgcacgcccgcagacgcgaacacactgtgttgggcggacgacaccgccgcgtggctgtgcggccgcgtcgacgtgtgtacgtttgcgtccttccgcgtgcgcatcgccgcgttccagcacccttgccgcgtgctggcgcactttttgttcgaagagagcctggcgcaacggtgcagcggcccgctgccgcgctacacgtacatgaactacgcaatgtttaaaggcgtgcttgccatcaagctgactgtgtacatcggcaacttgcacgctgacgggccgccgtactttgtggacttcgcgctcggccgggcgcaagtccgcacaaccgcagcactgcactttcaactgccgccgtttgagcggcgcgtggaagaggtcgttgcacagtcggtcgccgaatagccgcctcaatggacaattacaaacttcagctgcaagaatttttcgccgcgggcgacgtcgcggacgacgcgccgtctttggacgcgcccaacctgttggagcaccagaaacgcggcatagaatggatgcggcggcgcgaaaagcgcggccgtccgcacggcggcgtgctcgccgacgacatgggactcggcaaaacgctgtccatgctcatgctcatcgcgaacgacgatttggcgcacaagacgctgatcgtgtgtccgttgtcgctgcttaaccactggaccgtggaggccggcaaacacaacctgccactcgacctgcgccagtttcacggcggcaatctcgacgagccctttgacgagccgcgagtggtggtgaccacgtatgacacgttgcgcgcacattacaaacacctaaaagcggaagcccgcgaaagcggattgctggcgcggcactggcatcgagtggtgctcgatgaagcgcacgtcataaagaaccattacacggacgtgcacgcggcagcctgcgcgctcaacgccgataaccgctggtgcatcaccggcacgcccatccacaaccggcactgggacatgtacgccataatccattttttgcgctgtcgcccgttcgacaacgtaaacgtctggcggatgcttaaccgcaacaatgacactaaccgcattaagagtgtggtcaacaagattgtgctcaagcgcaaaaagacggaagtcacgctcgacataccgcagcacagcgtggagtacgtgcacgtcaagttcgacgaggcggagaagcatgtgtacgattcgctcaagaacgagtcgcagcgcgcgtacgacgacgcggtcgccggcggcgacaagctgcgcagcatgcaggacgtgctgtggctgttgtgccgcttgcgccaaatgtgctgccacccggcgctgaccaagtgttcggccatgttcaaggagcacgcgcgcatatttgagcccgcctacgagagcagcaagtgccggcgcgtgctggaactggtgcagggcgtgctcgacaccatggacgacaaggtggtgttggtgtcacagtgggtagagtttttgcagctcgtggccgggctgctccggcagcgcggcgtgcccgtactgctgtacacgggcacgctgcgcgtcgaggagcgcaccgcggtcgagaaccagtttaacgccgccgactcgcgctaccgcgtgctgcttatgtccatcaagtgcggcggcgtgggactgaacttaaccggcggcaatcacataattatgttggagccccactggaacccgcagatcgaactgcaggcgcaagaccgcatccaccgcatgggccaaaagaagcgcaccttcgtctacaaaatgctcgtcgacgaagaaaacagcattgagcgttacatgaaggcgcgccaagacaagaagctcacgtttgtcaacaaagtgttcgaccgttcggcgcttaactacgaggacattaaaaagtttttcagcttgtaagcatgaatgcacagtacgccacttgctatttgtgcgacgaaattgtgtacttgtttaaaaagcagtttgtgcgcacgtcgacctcggcagcggcgttataccgcaagcgcatggccattgtgcgcggcggcgtcgttattgtgccaacgttgcaactcggatttcgatggcggccaccctagtcggcgatggccgacagtttgaagcaactaaagagcccggaggctgcgtgactttcacggtgcgtcgctacaatccccacatcgtgggatttgccggcatccgagcgcacttgctgagaaagctgcgcgataaaggtttgctgctgccggccgacgcaaattgcgcgttgcacaccgtgccttccaggtgtgcgcactgcaaacgcagcttgactttggcgcccgccgtgtcgtacctgccctgcggccactcgtgcctgtgcaccgactgcgacgaattgtacaataagcataacgcgtgctctgattgcaaatgtaaattaaagtacaagctcaagtttaataaataaattaataaccctgtgttgttttattcaataaaaatgtaagcgccatttattatgatcatcactctgattttggttgtggccgttatattgttaattattttgtttgccagcacaagcaacgccaccgtcgacaacaagtctacatataatgttttaaattacagcgaccagttcagcagcgctacgtatgatgacgagctgctactttttgaacagtggttcaaagataacctgacgcgtgtttttgcaaaaaaggcggagaaagtggccaaccccacgcgcacttggaacaccgaaacggtgttcgacaatttgagcccatggacgtcggccaccgattttggcaccgtgtgccatacgctaataggttactgcgtacgctacaacaattacgccgacgctttgtaccaatcgcccgagctggcggacaacttggttggcggtctgcgaatggtgtgtgtttcggctgcccgacccggcgccgcaccaacaagcgccttgggggccagtggcggactggtaccattcaccatcaccatgccggaggtttttatgaacgcgaccatagtgctcaacgaaacgcgacattacgaggaagccgccgaactgactcgctactggctgagcctgtacctgccgacggccgtcaactcgttgggatggcaccgcacggcgggcaacgccatccgcatgggcgtgccgtacgtgtacagccagctgctacgcgggcattcgttgcggcagatcgcgcaagagccgagcgttcaagaaacgctgcgctccgtcgcgtttccgtttgtgtcgacgggcaacggtctgcaccacgactcaatttacatcgaccacttggacgtgcgcgcatacggctacctcatcaactccttctttacgtttgcctactatacgcggctttttggcgccaacgcggtcaacaacgcgggcctgacgagggccattgagaacgtgggcagtccggagggcgtggtcgtaccgggcgtcatgtcgcgcaacggcacgctgcactccaacgtcataggcaactttgtcgaataccccatcgccgtccacgcggccgacctgtccaaggtgctcaccaagctgtcggatacgtattacggcggtgtggtgggcgccaccacgcgcttggcctactatgaagccgatccggttaacaatacgcaggcgccgctttggaccatgacgcgccgcatttggaaccggcgcgcgcgaataatcaactacaactctcacacggtgccgttcgagtcgggcgtcattctgcagtcgctgaccggcattttgcgcgtgcccagcaccacctcgtccacgcagtcgtttaggccggccgtgggcaacaccgcgctcgccaagacgcgcaccgccggcgccatattaataaacgcacgtttcgcggaaatgaacaacctccagttcaagtcgtgcacgcttttttacgaccacggcatgttccagttgtattacaacattggcgtcgagcccgactcgctcaataacgtcaatgggcgcgtcgtgatactgagccgtgacacctccgtgaccacaaacgacctttcatttgaacttcaaagggccaacaatgacaactcgtccgagggcacgacgtttaacggagttgtttgccatcgcgttccaatcacaaattttaccgtgccttcgttgaccgtgagaagccccaacgcgaacgtggaacttgtcgaacaaataattaatgttcaaagcatgtattcggcttcggccaccgcctggtacaaattaaacgtcgaaggccattcggacgttttgcgcgcatttcgcattgacgacgaagaaatttatgtaaatacaagcacgggcgttaaagccttgtttgcctatccgtggctcgttttaaaagaagaggtcaccgttgtttttatgtcggccaacgaggacgtgctggtgccgttcagtgtgataacaaatgctttcaatgcaatcaacgaacctagcttgatgtattcgcccaacaattgctacttgcacggcaacggttttaaactcaaagacgacactattagtttgcaatttattttcgacatcatacaataactccacacaattaaacaaagactaaacaagacagatatagaataaacttgtaacaaaaacaatggaatgttaacaatatctttatttatttaatatacattgtgcctttgcacctgagcaactgcaatttatgccacggtccgtcacgtatacgttgaggttaataaagtccagcccggttttgagcacagcggtaaaaaaatcggcggcgccgttgaccggcaccacaattttaccattaacactgcgttcgcgcacgtgcacaacgctgtcggcgatcaccatcttgccgaagcactcgtactgttggcgcagcccgcttatttcaatgttggcaatttgcgcgtcggcccttgttcggtcaaacgtaaaggacgcgcggttgggcgtctcaaacagcgcgcggcgacacgcgtggtgcttatcgacgcgcacgcgcagactttgcaaagcgtccatttcactgcgagtcctaaacgtcaatgcgcatttgcggcgccaaatataaatcgagcgagcccagctgtcctatgcaaaatcgcagccgtagcggcgcgtcagcagtcatgcacacgtcaacgtccttgcttaaagtgcacgctcgcgcgaacgtgtttagataactacacgcaaacacctgagtcaaatgccgctgcggcgcgacgcgcaacagcacgctagcgcgcacgccgtccgcgtccgcagtgaagcgcaggcccgctgcgccgctcgacacctccacgctacccgcgcctagtcgcatcaagtcgcggcacactttcgcgtactcgtcgctgcgcacggccagtacacagtcgtgcacgttgtcaagcattcccagtcgttccacgtcgaggctgatctgcgccagcgcgcacgcgaccgcgcgccgagcactcttgaatttaaagtgtaaccggtcgtcgcgcgcgctagcgcgcattgccagtttcttacgcgggtcggcggcgtgcacgatcttcaccagaccgcgcacgggcacgctaaatgtcactttgcgctcgcacttgtaacgcgcgaacccggcgtgattcaggcgcaaatccgctaacgcgacgcgttcggcgtccatgccttgcaaactcacgcctttggcgtcgcagtcgaacgtggcgtacgacagtatgccgcgcaacgcgtccactatgttccgcaaagcgccggccgtcgcaaaaatggcttccattgtggctgcgggcagtagcgttcctcgcttttatttcataactacgttgttgcacattaacagactggacatgacgtcgaactcgccgcagttttgcggcaggttggagccgccgcgcatccactgcaggctctctgcaaggcggttgcccacgaatgattggtttttggtccactggtcaaagcgcgtgccttccactttttcgtggcccgtgtagttgtttttgttgaactccttgtagatgttgtcgggcgtgttgttaaacagcatgtatgggatgttaaatatgggatagcgctgcgcgtgcggatcggcgtggtcgccgccgcgcaccacgtacttgcgttcaatccgctcaaagttggactgtcgcgaaaggtacgacacgggcgacaagcaaatttgcgcgtgcgtgccatcttcagccatccactcggtgaagtcctcgctgcggttgagcacgcccttctgaccgtggtgaacactgcacaccttaacgccttccaggtcgtcggtggacgttacgaccgcggtgcgcacgaccaccgcgtcgcccgctacggtcatgcaggcgctaagcgactcgaccgcctggttgcgcgttcgtcgaaaaaacgcatatactttgtacacgttgaacgtgccgttggtgcacgcctcgatcatgcaccgtttgccgtcatgcgtccacgcgattttaacgctgctcagcaccgtgcccacaaagtactgcaccatgttgtcgggcagcaccacgtagttgtggggcccggtgctggcgacgaatttgagcaccggcgccgctttgccgactattgcgagtttgcccttgagcttgttgattttgtggttgtacaagcgaatgggtagcgtgacgtgcggaatgtacgggtcttcggcggtcatgagtttagaatcgcgcaccaacgtccacagcctaaccattttgttgttcatcatcacgccgtcgctgaccgccacggacagtccggcgggcaccgttccaagcgagctgtatcggaacaccggcattgcgtttttcaagtttgttagggctactatcattttgggcaccggaatggtgtagaacaaatgcgtgtacttggcaaagtaatattgttccagcttcgacatgaggcagcgaacgtcgtcgttttcttcaatgttgcacgcgccgattgtcggcgcgtggaaaagtgactttttgtagtgatattcgtagggggtcaggagcgcgttaatggtggcgtttacgggcgcggaaatgcgcacctttttacctatgcacaccatgccttcgtggtggtttacgtacaaaattttcaaggaaactttgagctcgatcggacagcggttgcgcttcagcctgtacaggatttttggcacgtcggcgagcgagcactgcaaattcgtgggccgatcgttgaacgcgacgagcaacgaggtgtcgtcgcagtgcgtcaaatcgtgcaccggcgcaaccaaactaaactgctgcaactctgcaaacttttcggctaccatgtcgtagtccacgttgggcagccgcgcgttgcggcacaaaaaaaactttttgcccgccacagtcatttcgccgtgaaaaaagctgccaataaacttgacaaagtcttttttttgtttaagcattttttggcgcacgctgtcgttggtgatgcgtgtgacctcgttacctactcggtatttgagcaccggcagcgcaatctcgatgttattgttgctgcaattgtcgtgctggctgggaaacgagcgccgctgtttgctgaacgttttggacacgcagtaaatgagccgcccgttgacgacgctgtccatgattttcttcgactctttattataaagaacagtttgcgtcttgcggcgcttcgacgccggcgcgtcgcattcattggcgcgactttggtaatgctgcaaaactatcgaggtcagcagcaactccatcaaatatgcatgcttgtatattattttgttggccaagttgtcaatggagtagcaaatttcgtggttcatgatcattttgatgtgatcgactaactgcagcttgtgcgctttgctgtattgaaacaagtagtctagcgggcgccacttgccgctgctggacaaatacgtttccaggactgcgttcaggtcgttcgtcacgacgtagtcactcgcgtacacgtcacgagcaaacagcgcatcgttttgcttgtcgtacaccagctgtatggcgcggttaatgtgcttttcggcgtccacattgccgtacaaaaacatgcgcttgcaatgcttggcgtacaacttgtcgtaaaagttgtgtattagcacgttgttgttcatcataatgttgggaaagctgagaaaacggccgtctagcataaacgtgccacgcaggttgttttgctcgtcaaactcggcgtccaccgctcgcagtcgcgcgtccagcgcggtgcccaacaccaccacgacgcatttgtgcagcacgcagctgcgctgcttattaagggcgcagcacgtgtacgatttgcgttcttgtatcgtcgccaaatcgagcaaccccacttccgacgcgcaacactcccacaccagctgcaattcgtgcggcggcgactctaatttagcgtacaacgcgttaaaatcctgcacgacgtccgtcatcttggcgagcgcgcttagcactgtcgataatcatgttaacgcgaaatttaaaacgcagagccgaacccgaaattgaggttggcaaccgcgtaaaacaaaacagatgcagcttgcaaaacaacgattttttggggctttgctcgctgcaggaaataaattattactgtgcgcttaaactaaactttgagcaaggacaagaagcggtgcaaaatgacgccgactttgcattgttggttgctaggcaaacaaatgttgtggtcaaacaggtgcgcaagtattccaaactaacggatgtgcaccataacaacaaggtgcacaacgtgttgatactacttcaacacgcgcggaccgttcttatggacaaaaacaaaaaacggcggtatgacagcatcatattttacaaaaacgcaaaagtgttaaaaatctgcgacactttaatgaatcaactcaataaaattaacgccgacttgttaacagctttgacaatatttaaaaacagcatggcgttatttgatatttcaaacgtgatcacgcgcacgctgtcggaggcgttggagaactggctcgcggcgcaacccgtcgtaatggaaaggccatctagcacaaaccgtgtgttgattacatggataccgcatttgggtgaaaaaacttttgataaacaacaaaaaaaagacctcatattaaacaactttttaatctacggcgaaatcaaaaacgtgtacgtatgcgacattgacgaaaacaaaaacactgctatagttgaatacaaaacgcaggaagcgcagggacaagccatcgagcaaagtaggtcgcgagatgtgcgttttactgtgacggaatacatgctcacgaaattttacaattcaagtttgcgcgccgagcttctcaaagacatggacaatttaaacaaacgtttgagcgacacgcaacagcagttaatgcaactgaagtcgcggtacgcaacatagctagatatcggttgccaaaagcacatcatttgtttgtcgactgccgtgacacccgtcaattatgcgatgtttgccatcttatgtcgccgcgcggaacattgttagtttaaggtcgcggtcacaccacaatgcttttgaccgtgcacctgaaagacaaacaatattatttgtacaaaatgttcaaagaaatttggtcatcgtgcacaaccgaatgcagaatttgtttggaaacgttgggggttgagggcggcgtggtcggcgtgcccgacaacgggctgctcaacttggacaaaatgttccacgccgagtgcattgcgcggtggaaaaacgggtacagccgggacccgttcaaccgtgccatcaggtactattttgcgttcccgccgccgacggtgcacgagtgcaagacgctgttggagcacacacgcgggtttatcggcgacgatgaaatggaccgcgtgtacaaggtcgtttaccagcgggtcacgaccgagaacgcgatcgacgtggagctcgactttgcgcgctattttaaacatggcgcacgcgttgtcggcggcggacgttgacctgatagcgtgtgtgttaagagacaatttgtttttggtgggcaacagccttaggtgtaatgtgttcaacaaagaagctggtcacgttgaatccgtgtacttcggtgaaattggtgccgcacaggcccatccgcccgaccaagatgcagtgctggatgcatcctcggcgagcgacgtgcaaagttcaacgtcttcacaacgcctatcataacaacgagaccggcttgctgcacatgaccgtgtacaacgacatttttctagacgagcgcgcgcggccttactaccggcggctgctgcgcaagcgcttcgacggcgccgcggcgcgccgcacgtttttgaacgcgggtttggtgcacgattgcctgcttctcgatccggcgcccagcgagcacttcaagagtatcgaggaggcgggcgaaacaaacatgagcacgctcaaaaccatcttaaccacgctgttaagttatttgggccgcgtggcttccaacgagtatttgctaatcgtggaccgcttgtttgttgacttggtctactcggaatttcgcgccgtggtgttgccgcagcacgcgtacgttttgcggcaggcgtgcgagccggcggacagcgacgacagcgaccacgagcgttgcgacaagcgcgttgaagcgccttggaaccagattgtggtcgcggcctacgttaacgtcgttaacaaagacgacggctcgcgctacaatgagtggcagcgccaatcgcaatatatttaccaaacttttttggtgtacgcgaccttgctcacgacaatgctaaaacaaagcaatccgttcattattagcgaaaacagttctgcgtcggtgatattgcgcactttgggcaaatgtcccgacaatccggagcgcgtcaactgctgcaagcttaattacgggggcgccgcgccgggacacatcatgtgtccaccgcgcgcgatcgttaaaaaaatttatagctacgtgaattgggcgctaaacccgcacaaggatcagcgctacagcgcgctaattgcgcggccgtccgacgcggcaacaggtgccggctcgggagatttacgagagaacattaacggtgatttgcacgccgaagaaattacgcctttaattttgctcgattgggacaactttgtcaccgcgattatggattactttggcgcgccgcccaacgcgcggccggcgggtatttaacggctgacctatttgctgtgcaaacattgcaatctgggctgattagcggctggtcgccaatatgaaaaaagtgtcactgggaaaaatcatagaaagcactgtagaggaaaagtacaggtatcgctttggcgccgagcaaaaacggccgaacttgggcgagtattacaagacgtttgcggctattcgcgtgggacagcacattaacacgcacaacgtcgtgggcaacagggattacaccgccttgacaacctgttaaaaaagtgctagcatgcttcgcgcgctcaaacgccgtttcatgcccgccagcgacgagcggcgccgcgaggaagacgtagtattgtgtcccaaatgttatttcgtcgcgcccggtcgcatttccgtcgcagactacacgagattgcacataaagtttaatgaacagtttgccgacgcatgttcaaacactttagttgtaacggagcctaaaacttggtcacattacacaaattgctccgctctctactaccccttgtgttaataaatgtattttggtaaatattgtggtttcgtttcaaatatgtgatgtgccaaattgtactttcaggtttgtatgtaaagccgcgtttagcttgcaaatgatattacgtgtttgtataaatacgattcccacgcagacgccgtgtttatgtgccaggtagcgagtctatcgagtggacgttcgcgatgattcaatctactcacgcaagacgtttggagtttgataacgtaattttggacctgagtcaagtcgaactaaacggtgcggccgaacacagctacgttgtgtttctaaacgtgaaacgcgcgttttacaaaaatttttgtgtggcctgcgacatgtctttggaaacgttggcgctgcatttgtacaataatgcacagttgactataaacggcgctgctgtaccgcgcgcgcccgatttttataactacataacttacaacgcctgggaccgcgaccagtcgctggttttggaccttgcgccggacgccaggattgtggtggccaaacagttgcgcgccgacgagcgctaccatcagcgcgcgagcggcgtcctggactttcaacgccgacacgaattagcgcccgctgtggagagcgacccggccgcgcgaaatgcgctggatcgcgagctagaaatgaaactgtatacgttgtgtgaataaaaatttattttttgaaatgtaaactaatagtcgtcctcgtcagaactgtagtttgcggttttgccaacatacttttggccggctgctactttgcccgcaggttttttcatgaacgccgtccgctgtgtgcgctcgccgccggtgttgacaatgtgttcctcgccggtgtcgacgagttcgtcgtcgctactgggcgcactgctgctgtcgctgatgctgttagttttgctggcgcggcgcttatcagtgctaaggcggaactcgctgccgcggtcgggcaactcgcgcggaccgtcgctgtccgaagacatgtcgtcgcggattatttcgtacgcagcccgtcgcggaatccactgcaagtcgttaacgcgcacgtagcgctcctccagcgcctggcgcgccttctgcatagccgcgccctcgtcgccggcgttgagtttgtggtgctgagagaatgtattcacaaacagctgcttggcgcggcgcggcattttttcctcctcatacagggtgtcgggcaggtggtgcatcgctgctgtcgtcagtttcggtggacgagtcggaagacgacgagctggtggtgtccgcgtcgttggcgttcgatttaggtcgccactgaccgttgaccagcgtgtactttttgcgaacagcgcaaacggccagcttaacagctatttctttattgccaaatttgcacaaactgcgatcgtagaacttgtgaaatattctcttaccattatgcggcaaattatgtaatttttccggtaacatactaattaaaatgatattactactaatggcttttatttacccgagggacggatgcgaatggcaagacacaaccagagattcaacttgatcatttaagctacttacataatattcaaattatattttccagcatgcgctgtccgtctgcttggaacgcgtttgctttgtcgaacgcaaaaaggtcgttggttttcaaataatcaatgtgctgatcgttcctgattatgaatacgcgacttttttcgtcgcggcgcaccatcacgccttgcttgcacaaagaaatgtatttgtagacgggaagcaacgcatcgcgcgccttcttgagcaacagcttctgttcagggggcgcggccacaaatattttcacgggcccgtcgtattcaatgtccaggctgtgattgtttaggcgccgttcgcgcgacttgctctgccactctttggcgcgtgccgcgtcgcacaacctgaccattatgtgattcttgtaaaaggacgagtcaataacatgtttaaaatcgagatcgagtagcgcgcaaattttttttaagtaataggtcctgatctttttgttgtccaaacgtgcgtcgtgcacgccgtacacctccacgctgtcgttcaaccggtcgcgttccagcgcctttagttttacgttcattgatttgatgtcgtccgattcgtcgatttgcgcgttaattaacgacttgagcagcgccacgttgattaactgttcaaaccggtccatggcgccgcagttgtaattgtaaaccctcttatagtagcgggcagcggccagcgcgtacgtgccatggtgtcgtttctagacaagcccgcgaccgagtttgacctcattttggaccccgaaaaattgaacaacgtcgcgtttttttccaacgacgagttcaagatcgtcttaaggtcgctgattggcgatcttaaaaaaaatcaacggcccaactattttaatagtcttttggaccagatgatcaacgtgtatagcagcgaaagcgccggcgctcacgccgacgcgcttgtgcgaatcatcgacgctacgtgcgtcatcgtgacggacttgccgtcgaacgtgtttttgaaaaaattaaaaaccaacaaattcaccgactctataaattatctcatcctgcccaattttattttgtgggattacaattttgtcgtatttttaaccaacacgttcaattctaaacacgaaaacaacctggtggacatttcgggcgcgctgcagaaaatcaagctgacgcacggcgtcataaaagaccagctgcagagcaaaaacggatacgctgttcaatactcatactcgacgtttctaaacaccgcttcgttttacgccaacgtgcaatgcctaaacggtgccaacgaggtgatgccgccgctgcacagcgtgcggcgttattttgggcgcgacgtgtcgcacgcgcgcgcgtggaccacgcgccaccccaacatcagccagttgagtacgcaagtgtcagacgtgcgcgtcaacgaccgcgacaccgattggaacgtaaaggtggggctgggcatttttcccggcgccaacaccgactgcgacggcgacaagaaaattatcacctttttgcctcggcccaattcgttaattgacctggagtgcctactgtacggcgacccgcgctacagtttcatctgcttcgacaaaaatcggctagcgtttgtgtcgcagcaagtgttttacttatataaaaatattgacgccgtagaacgcctgctgaaaacgatgccgctggcgcaagccttgtggcgcatacacgccgacgtcaagttctccacgcgcctcgaattgctactgcgcgacttttgcctggttgccagctcgaacgctagttacttgctgttcaggcaattgactgcattaattaaggacgaggaaatggtgtgcggcgacgaggagctctttgggctagcgggccagttcaccgacatggtggacagcggcgctaagggcagcgccgctttgttcgaaagcacgcgccagtacgcgcgcacgcgcgcaacagacattgacatcgtttctacgcgcgccaccaccagcctaaacagttacatttcatcgcacaacaaagtgcaggtgtgcggcgcggacatttaccacaatacggcggtactgcagaacttgtatttgaaaaacaacgccatttgctacaaaaacgacgatcggcagcttgccagtatttgtgctttgccgtccgaatatttatttcccgaacatttattggatctttttattgaaccgtaacaataaacacacataacatatgctttattgtttaattataaaaacgtaatataattttgttaccacttgaacaacaattttattctaaatattatgtttgaatacgtatcatgtttgaatacggcactcattaaaccttttacgttggtaaatttgatacgcattcattaaaataaataactttgcatgttttgtttggctatttttaataattaatatcaactttcctttataataattggtatcgtcttacacgaccacagtttgtattttaactacgcaaattagagcgttaaatcgtaggtgcctcaggcacgataaactacagctcgtcaatggtctcgcgaacggtggggtcgttgttcgacttgccgtgcgtaccatagcgacgcgaccggccgttgccgcgtctataaccgcgattgtggtcgcggtgctgctggtgcctgcggtttctgttatcgtgcgtgttgtagtagccgcggcgacgggttcgcacgcacgactcttcatcatcgttatcaccgtttccgttttcggcgccaccgtctcccacgcccacgtcctccgcgtcatcgccttcgcaatcgtcgcaccgatcctgatcttgattgcgcagttggtcgcgcacggccttggcggcacgcgcgtatcggcactcgtcgtcatccgactcgaacacgaggtcggcgcaattgtagaagccctcgcccacggggtcgatgcgctgccagcgcacgtacatcacgaactggcccgaccggtacggcaccgacacgggaatggagtagatctggttgctgtcgcacagcgggtcgcccgggttaggcactagtcccgagttgttaccgccaatgtactcgagctcgttccacgtaatcgggttgcgccggtcccacgtggatttggtaacgaatacttcgaagtagctgggctcgtggatggccgtggggcagaagtgcacgtccatgggatacgagttctggtagcggttcatgtacaacacgtcgggtcgccagttgtagaacggctcgtccataccgctcttgtcgccgaacagcgcggcgcggtcattggacgcggcgccgcacaacgtgtgcggcaccacgtctcgtttgaccatgtcaaagtcgaggtagttggggccggccagcgccgcgtactcggtatactgctgaaacatgtattgcgccgccgacgcagcctcttgcgagggcacgtttatggcgcggtacttgtagtaaacctttttgtaagcgttgcggcacgcctcgtcgggaatgttgtcgccattgtttggccaccaaaagttgccgtcgcggaagcacttgtattgcctagcgactggcaccgacaggtagccgtgcgagcgcactgcgggcgctaagaacagcgcaaacaaggctacgccgagtttgtacattttttctatgtcacttacaataaaataatttggttaaatttgtattttatttatacttgtacaaagagaatttaaacgtgttgtttgagcctatggcttgcgaacaatcctcgtcgtcctcgtcgctggaatcttcgtcgttgctggccgctttttgtttccgtaaagcactgggccccgcacgggcgcgcttgcgggctgcatcgtcgcttggcgcttttcgcttatacgctgcgttaatcttaattagcgtaacgcgctttttgtcataggcctgatgctgcatgtatttagtaaggatagcgtcgtaacacttgttcaacgcgctggtgtgctcgtccccgaatatttctagcagctcgttcataaaggtgttaagaatggtcatgtgttttagccaactaatgcgcatagttcgcgggtcaaacaagcgcaggggatacgccttttgcgtcacgctgccctgaatgtcgagtaacacgtacggaatgcgatcgccgttgccgggcacaaagtctgtgcccttgtttagtaaaatctcgcggcagtggcgcgcgacggtcaccacgcgccgtttcgtagggcgagattcgttttcggtcactttgccggcgccgtcgttgtacgtcatgctgaagctgtaatcggtaagtggcttggtggtgccaaacgcgtcaaaatacatcaacatgttaatcagtaggctgtccaggcatttttgcaagtcttggtggcgcagcacttgttcaatggcggttcggaacgcaacacgcataaacacgggcatgtcttttttgactagccagcccttgaacacgattttattggcgctgttgatgtaacaatactttttcttttttaacagaattaaaacgctcattaagttttcaaacgccatcttgtacccgtttgcgaacaagccgtttacgcgggtttccacggccgcgcaaatgcgggtaagcgtaaccatgcaactctcttcaggtatctcgtcgcgtttaaacgtggggagaacgaacgtcgagtcggtatccccgtacagcactctaaacgtgagcgtggacaggttaaacttgctaagtagttccgcatcgttgctaaggccctcgatcatgccgatggccgcggttagcttttcgcggcccacgcgtgtgatgtagttagccaataacttgcaaaaaatgccgtaatacccgtatatgctgttggccgtgcgcttgcttagattctgcatttggtcgtacaagtcgtacaagaattcggagtcagtctggctatcgcgacacttttttagctcgctgcgttgcttgagcaattgcagcaacaactgtacgtttatggcttgcttgtcctgatttaagtacacgttaccgtcctcgcaaagtattaagttggtcaggcatgcgcatatatctatcataatggtcaggtagagcgaattaaagtccagcgaaaacgcaaattcgtacacgccggcgcgcggctgaagcactttgccgccttcgtaattgacaatttcgttaatggcgcccaaacgtatcgagttggcgggcaagtcctttagcggaatgcgcttgcgttgcagcctcgacatgcccgcgcaaaatcctgcgtctttgctggacatgcgcccgaggtcgtctttgttgaaaaaatacgggtcgtgtacgacgaggccagtaacggggtctgtacgagtgttggtcagcgccaggtggaaaaacgtactactgatcaaatgggatatgttgcatataaaatcgtcggtgcacaagcggtacatgaggcattgcgagtacataaagtcgttcaattttagtttgttgaacaaacgaatgggcaacaagcaatccttcaagttgtaatcgatcatggtgcctagttgtttgttattgtacatcgccaccatcgtttgccagttcagatcaactttgttgtcgtttaaataatattggctgagcgtgtttagctcaaagttttccacatcgcgtttgttggcgtccgcaccaaagtacttgtacagatcaatgtgaatatagtagttgaagtaataagtgtcagtccgattgccaattttggttataaacagcttcgtgtttggttgtagtgccggtaggtcgtaccgccccaacaggggcttgtcgcctttcaggcgaccgcggatgtacggtaaatcgaacacgtcgccgttgtaatcaaggataacgtcagggttggcgtatttaaagaaatcaaagaacgacgctatcatgtggctttcgttgttgaacaccaccacatgcgtgtattcgtcgtttccggaaatttcgacaagctctttgtggtacacgaaacatattttgtcgtagcggttgtctttgagcaccgcaagtccgatgcacatgatgacgtcgcattcgggcttggagctgttgtgtccgtccgaatgagtctcgatgtcgaagcatgccattacaggctcaattttggttgtcaacgtggcagggtttaccacttggaaatcgtccgcgaaacgctctaactcaaacggtcgcgcgtcgtcggttacgcagttgttgcgacatcgctgcgcgcggcgaaaacgcatatacgtaccctcaatcacgggcgtttgcatgtgcactcggttggcgttgtgcaaaaacttgtccagcgccgctgccttttcgccaaacgagctgccgttgcgcttgaactttattacgttaatcttgtccatgtacacatttttaacgcccggcgccacaaacgtgttgtaactggagcagcggttgcggcaggtggcgaatatgtggctgttgtagcattgtttgtacgaatacaggtccatttttatggtaaagtaaaattgcgccagccggccggccaactgcgtgttgcaaaacgccaccagttggcccacattctcgttgtagtaaatgcgcattacacggaaaacgttgtcgcgcgatatggcaaaatcgcgcggcgaatagtcgcggaacgcctcttgtagctgattgtaagtaacgattttcatttcgttaaaatgcagcgcaatttgttgagcacgattaattccatgagcgcgcgaatcaaggcgctggaacggtatgagcacgctctgcgggagatacacaaagttatactggtgatgcgtccgggctttaacttgcaagtgctggaccccgacgccatgccggcgctgattgtgcagttcttttccgacttgacggatcgcaataccacgcacaacataaactacaggtacgattacaacgtcgccggcgctctgccgtttcagccgcctccgccacagccctatcacccgtatggacattactggccgcaggccccgccgcaaccgccgccacagcaaccgccgccacagcaaccgccgccacagcaaccgccgccgcagcaaccgccgccgcagcaaccgccgccgcagcaaccgccgccgcagcaaccgccgccacagcaaccgccgccacagcaaccgccgccggcgttagtgcaacagatagagttgtcggccgacgaaatacgcgagctacaaaaactgcacctaaacatgcagctggaaaccattacatggagccattttgccgctttcattggctccgtgacgcatatcgtgcaaatgcgcattgttaacaacacgtttttagttgacactatagcagctttgcaaaacgttaagcggttaatcaattatgatttttacgagtttttgcgctgtgtggccaaagagactgctttgctctttgaaatttcaccatacctatgtcgtgttttcgcgacgtttattcgattttttcaaaacacccacgagttgatatacatggtgacttttacttacgttgacgcgcaaagtttaactgatagcgtcaattcgttgcaaactattgtccgtaaacttttttggttttttgctaaaatttacgtgcactttaaacggaccgaatttgttttcataacttttgaccattttgtcagtacactcgacgagttaattatgctcgttgaggcgctgcccaatgcggcgcaaaacaacgccgaactagatcgctttcattcggaaatgcgcgcgctgcgcgcaaattataccgagttgcaaaaacaaaaggtcgaaattgagcaacgtttagaaaccgcaaacttgcacagccaaacggttgataatagaaatctagagcttaaccaacaaatacttacgttgctaccgctaaaggaaaatttagcagcgctttcgttgaatgtaaaagagctaacgaaagaaaatgtacatctaaaagccgaaatccaattacaaaaccaaccggtcggtgcgccaaataactcgtacctaaatgaatttaccgaagcacaaaaaaaattccaactggagcaaaaaaaacgaagggatttagaacaacagttgcgcgacatacaagcgacgcaagcgacgcggtcccaaagcgccgacaatgaacaccagaacacgatttcgcagctgaccgcgtcgctggccgaaaaggacgcagaactcgctacacgtgacaaagagcatgcttttgcgatggataaaaaagacaaagattacgcggataaagtgcgaagcgccgctgaagattacatgtccaaattaaataccttccaaagtcaaattgaggagctacgacgagaactaagcgaaagaaatattatatttgaacaaggtaggaatgagtattatcaggccattgatattataaaagtaaaagatgatcaactaactcaagctaatcaaataattaacaatttaaatcaacgactggaagaggccaatgagcagttgactctgcaaactaatgtcataaaaacggaaaagggtgataatttaggaaaggaagaagttgaaactttgcttagcgccgtaaacattatgtacaaacacgcacagcttttagaccgcaatttgggcggcagagatttgtcgcagaatgttgaagacttgcgatttgagatagcgatgcagcagcgagacgcgttggaccagtggtttggcattttaaaacaaagcattgcgcccaacgacgtcctaaattttgcgtccctcgcagacgtcaacgacctaaaaagccaaatcgttactaaaatcccggccaacatgattacgacggttgacaaaaaaattatttcatacgaagaaagcggtaatgtggacaacgttacagttatttctgccgtgtcgcgattggtagacgagtatgaacgattgggaaaagaaaacgttcagctcactgttgacaacaaaacgttgttcagcgacaacaaaacattagttgagacttgcaatcaaaatttagatagtttgaaaacggatttggctaaaaacattagcaatgtggacgagataaacagtctggtgaacatcacgcccgatctagataattcggctattcagaaagttcgtgacgatctgatcgtcgcccaaagcaggttaaagagtttaaaagaatctaaatctgtcgatctaaatcagttggcaagcgcgagcgttaaagaggaaatgagcaaattaaacaacaatattctcgaaatcaattctttattgtcgaaacactcggcaattacggaagatatatttaaatggaaaacgacaatgctggaagtgtacgagtcgctggcgcgcgcagcggccgaagaaggaccgcttgtttaaagaaaattgtactcgcgttcctcttcatcgtatttcagcaaacccaacaaattcatcgtgttcgggtccgcgttatcaacagtaacaaagatggcggctttggccagtccgtcggttaaacacgtggccaactggtcaaaatccatggacaatttctgtatattgttaatgtcgtgcggctcttctttgttgccaatgctgtccacataataaacacatttgctccatttgctgtcgtcttcctccattgaatccacagttttaaattgaacagtgaagctattcttgccattgtcattagtttttagctccgatttaaactgtgccaattgtatgcattttagatgtttgttggcgcgactaatgttgtttgtcgagcggctgtacacaagttctgtgtagtagtcgtcgtcggtgttggtaggcttttccaaactggtggacaggctggccgtccagtttaaaaacacgttttgccccttgctcgtgtattggcacttaacgccgtgcacgtaaaacaatgtgtccgcttgtttaaaataaaagttcattaactcgttgaagtcttcgggatttttcacatgcgctttggcggcgttcgccagcacttttaagttggcaaagcattccacttgctgcacgcacatgtcgccgcccacgtcctgcatgttgaattcaaaaactagtttgtagttgttgacagtgagccgtttaaatacacatttcagctttgccaaaacgttcacgatttcctcgttttcaaagtcggcgcgagttaaattctgcttcacggctacgctgtcatctaccgccgcattgcatttttcgtattcatttatctcaatgcgctggctgcatctggttttaacaaaatttaagctgacggcgtaacactcttgctcaaccagatccttaaaacattgcagagtgccataatacgcctccgttttgttgtcgtttaacaagcgaaacgtaaacgtgtaataaaggttattctccaagcttatcgtcgttttgttaagcaattttcccgtcacttgtttgtaattctctttaactcttttgcgcggcgggtcgctgccgcaatcgtttacgtgctcgcgtttggtggccatcatgtgggacacgatccgatggcaagtgttgagctcggacgaagtggaggttgcgcctgagcaccgcgcgctagcttggcgtgagttaatcgccaacgtggctcacgacacgccgctcgaatacacgtttagaacaatgtttcaacgcgccgatttggaaaactttgactataacacgccgatcgtgtacaatgttaagagtagggaactaattgttttgaacgagagaatacgagctgcactaaacagacccgttcggcgcagcgaccgcacgatcaatgttaacacagcgcacgtttttctgctatttattctcgccgtgttgttgacggtgctggtcgtgtttctgccccggccccatctgcgtcatgtcgcaacggaagctcagacaccttaaacaaaaacttggcgcattcacggacgcgcaaataaaacgcgctcgcgcacgtctttttgatcgggcaacggagcgtcgtccgcgctgctggcgcaaactggccgagatagacaaacggttcaacgtgtgccgcggcgtgaacacggcgctggacctgtgcggcgggccaggcgagtttgccgcctacactttgtggcgcagcccgctatgtcgcgtgttcggtgtcacgctgaccaggaatgcgccgtacaagcgagcagtttacgcgcactccaactttacggcggtgctgggccccgacggaacgggagacgtgctcgacaaaaacgtgctgttcgacctgagcgtgacctgcggcaacgcgtgcgaattggtgcttgccgacggagctgtggactcgaccggccgcgaagacgagcaagagcgactcaacgcgccgctaatcttgcgcgaaacacagctggctttgatttgcctccgccccggaggcaattgcgtgctcaaggtgtttgacgcgttctacggcgaaacgctgcgcacgctgcaacagtttgcgcgccactttgccagctggcggctgatgaagccgccctcgtcgcgcccgtccaattcggaacggtaccttgtgtgcctgggcaagctgccgctgccgcgcgacggaaaagccgacatggcgcgcgtgttccgcaaattttgcgcgtcgcaatgccgccatcttaacgaattgttgcgtgagttaggcaaaactaagcatggatttgcaaaagtttaattttttgctcttgtccacgcacgggcgcgtggccaccatgtcccccatgtcgcttgatcacgcccaaaaagtggacttggccaggactggattgttttttcacaacaacctaattaaatgcatcgggtgtcgaacgaccatggacaaggtcgacgcccgccgcgccaagcgccacacgtattccgacagctgcatatcggccaccaacgccttgctggttaacgaaaatttgcgcaaacaatcgttttcctgcttcaaatgggcgcggcggcagtttaggtcacagaccagggtggttgacatgttgagtcgccgaggcttttattgttttggcaaacgcgcgcgcctgcgctgcgctggctgcaaagccatggcagcgtacgtttcagttgacgctgcgcaacgagcgcatgccactgcgtgcacgtttcggcacgtggtcgactttgacataagcgaaggcgatctgtttaaaatagtaaagtcggacttgccgccgccgcgcctcgagccccacgagttaaacgcgccgacgcctgcaaagcccagcgcgccacccgacgtcgccgccgccgccgccgtgtccgaatgcaaagtgtgcttcgccaacgaaaaatcggtgtgctttttgccgtgccggcatttggtcgtgtgcgcagaatgctcgccgcgcttcaagcgctgctgcgtgtgcaacaacaaaatcgtgagccgcataaacactctgccgcaatagtaacagtaagctgtaaaagcttttcgtattgtatgtctattaatttatttgcatattgcaaactcaaattagttaaacgcgcgtccaaaaccttttgcgccctgctgtgcaggtgtgtggctccggaaaacgccgaaaatgaccgctacgtacaaattaacaacaattgcaattttatatacataaacgtaataaaatattaaaataaaattgtttgttttaattttaacaatttacatgtttatttttaataaaattaaatcgactaatatatttatacaatttaaagtgttagtgtttaatttcatcaactcttggggctgttcaaatgttattttattggcgcgcattgccaattttatcaagcgctcttccagctgcgtgttctcaattttgttttttaaaaaatcgtcggtttctatcgacaaatcaagaactgtttcttgcacggttttcaactctttttgagacgtcgttatcatggctcaaacgtcaaatcgcaacaagtaaacgtgagcacgatgcaatttggcttaatatagtcggcgttaacttcgtgcaaattggcgttgtctatcaattcgctgttaaatacattgagcacctcatttttaaaagtgttgcttttagcgctgaccatttgcaagtgatcttgcaaacctttgtgcgtgctttttttaaactctgcgtcggcggctaaccgctcggcgttggcctccagccacagtttaaacggttcgtccacaaacagtcctcgcaatatttcgtataactgacgacctagcgaatacacttccttcacttcttttatgtttagttgcttgctaaggaaaatcacggacagctccacaatgtcttgcaactgtttgtagtattcgacgtattccggtttcagcttcaaaccgtccaccgtgaaattttccggaaaatcgcgcaccgtgcggcgatgcggctgttcgatcgcaatggcaacggcgagattctcgttcgcattgctcatgtctaaattatcttataattggtacacctcgtccacctgggccactaaaaagtttgacaattcgcttatgtcatcgtccgacaatttgtatccgtttacaaatttttgcgtgacgctcatcattttgcggttgccgatgaaaacgcgcgcgaggtaatcgatctggttgttggtcagcagcctggacgggtcaattgtgttgaccagacagtaaacggattcgttgtccagttgcccggcaagaaacattttcaatacgccgcgccacttggccgaaaaccggtcgtccggatacacttggttgtttaaccaatcggataggcgcgctttaacaaaaatgaccttggcgacaaattcggttgactttttcagctcggtaacaaaacccagcaagccagcggccatgtcgtcagtccaaagagctggtgtttttgttaagaatggcgtccagcgcctgttcgatttccagcttcttgcgcacgctcttagctttatgactgggcaggtcgtccgcggccgactccgtatttttgcttattaacgccggactgatcagcacaaacaccagcaccaaaatgagaaaatagaacacgatgctgttttccttcttgtcgtacaccaggctaaacacggccagcgcgcccagtaacaagtacaaattcattttggcccttactaatcgcccgtttgatagtacagcgaggatgagcccgccgaggaaccggcggacgagtcgcggttgtttgcgccaagctcctcgtcgctgctgctttcgtcaaaattgtacttgttaatatacggtttggtgctggccggcgaatcgtggttcattaagcgcgccaccttttgcaacggcacgccgctgttgtacagattactgctcaaatagtgtcttatcatgttgctgcgcgggcgttccatctctacgcccgcttcgtccagcagccggcggaagtctttaaacggcgtcgacgtgttttttgaaatttgcaacacggtagggttgcgcgcgtagatttcgcgcgccagctccagcggtttggtcttgatgttgtttagcgtgtttctgcggctgcgcttgcgcttcaggccgatcgtgctgctgcgcagcttgccttttttaataagcacgttgaggtcgtcgacgctcagctgccgcgcctcgttgatgcgcatgcccgtgcccagcattatgcaaaatacgatggcgccgcgaattagaccgcggtcatgcacgtagtcgctgttcatcagtttgattttgcagttgataaaattgagaatagtgtctatggcgttctttaacataaagttcttttctttctcgcggatggtttttagctctttatcgcgcggcagcagcaccatccgcggaatcttaaactcgggcaggttcatggcgttggtgtaaaagttaatggtgagttgcaacgtttctttagttaccgaacgtagctcaagcatgcgcttgcacagctctttagggttgacaagcagccgttgaaattcaatagaatcaaattccttgtccagatcgtacgatgaattctgcaagtccgactcctcaattaggctaaaaataatcttgattagccttgatttgtaactcttgagcgtggtcggcgcaaacggtttgggaaacatgtacttgctccacaaactgtcgttctttacttcgtccggcgtgcagcgttggcggtcggtagccaaatcaaacacgtgctcgaatcgcggcgccgactgaatgcgcgctttccagtcgttgaacgcgttctcgttgcgaacgtccagcccatccatgttagtcgaatttgttaaacacaaaagagggatcgtcgtcaatatcgttggaatattcggggcgatctcttagtattacaaaataataaattacatacagcagaagaaacaacgccacaaacgcgattaaactaatcagcacaatcaaaccggccgacatctggtttgctggcgcatccatctcgccggccactttatacgccgcaggttcggcttcatgtgcggacggcgccggcgcgtcgtcgctgagcgccagtttgagcggaatataatccacgcgctcgtggttgcccagccggtaatagggaacgtccaggttcatcgcagcggcttgtcggccaacaaatactggtgcaaaaaccgcggctgcgctttgatgagtcgcaacttgaaatatttgccgcgtttccgcttaagattgtattccatttgcgcggcggtcttgtagtcgtacgcgctggcgctacagtagagtaactgcaagcgtttggcgccgcgcagccagcgcgcgccaacgccgcgcgcatgctgggccagccgccgattcagatcgcttgtaatgcccgtgtaaagttggccgtcgttgcgcctcacgatgtatacgcaccacaccttgttccggtatagactcatgacttacagttctgcgcgcgtcgctggtgggccaaccacagtgttgtggttcataatcataaaaatgaaccgcgtgagcgtctcgcactgcgctgctaattgggacaagcttttctggcacgcgctctgcgttaaatgaacggccggcgaattaatggcgttggcggccgacgtaagaaacgccgcgttctcgaacatgtcggggcgcttgccgctgcgcgtggccaattgggacatgtaattgaagatgtctgcggacgccgagagcggcgccaaaaaccccacgttttccttgagccccacgactcgcgcgcggtttttttcgttgagcacgtaatggtagtaggtgccgccgccggcgaacaggtcctcaattaccgcgttgataaggtcattaatcatattgatgtgaacaaaactgcgagacttaacggcctcttgcatgttgtcaggcagcgttgcgcgttttaaaagtaaagttacgtagttgttggccagctgttgatcaaacggtaacggaatggggatgctgcacgtgaccgcttccgaaaccatatattgcaccgcgaggctgagctgcttggccgcttcgttgagcgcgtccttgcccagcgaattagcgcccccgttgtagaacttttgcgcgtacgccggcagcgaattaagcacgaacgacggctggaagatgttaaagtctgaaccgaccgcctcgaccacgctgttctggcgcagctctttttgcagcccgatcaaatgacgtacaatctcatcgtcactttgcacgcgcttgattatgttcacgcttacggggttgctgtcgatgcacatatcgcgaattgtgtttataaagtggatcatgagcggtgttagctccgacatgtcgttgcaccggtagtaacgaatgattttgtgcacgtagtcggtgcacttgttgtaccaaattgcctcgcccacgtcgcccgtcttggcaagcgacatggcgctactgctgcgactgtccatgcgcgacagggtgttggtcgtgccggtggacacaaatgggtgggccgattgcgaggaggttaaatgaaagccgtcgcgctcattcatggttttttaatgcgttcttatgattgcaaaatacaacgtgaggattacttataatatagttgttgtggcagaacaacgccaacaaaattagcataataacaagcagattgagcgccgaaaagttttcgacattaaacagcagcagcaggacggcggaacccagcaacagcgtttgaaaactgacgcgtcgacacaaaatactctcgcagttgcggaacgccacgttaaagccattctcgccatcgatgtatctgcgcagctctgatttgcagcagtcgtcgcacattatgtgcacttttataatgagcccttcggtgtgcaccgtttgaaacgtgcgcggctggctgcccggatgaaactcgaattcgtagccagtggatgtggagacgtgcgcaaagtagtgggccaaaatagacgcaccagtttttttaacttttaccttgtacaccttgattacgttaatgttgctgtgcgacttgtcggcgttgaacccctcgtacaggtactgcagcaaaagctcgctgtcgtatttaatcttgttcgtgctcgtccagtttttgctttttgggcgacggcgatgcgtcgccaaattctggccctgggcgttcggcgaaagcgccttcttcggcgcgggcggattcgggctcatgctgcggcggcgccacaacgcgcttcttactattccatactttcagcctaaaaacggcgccggatattttgatgttgtcgcttttaacatacagcatgacttgcgcgccaaaacgatccgaatctaccaaattgtaatggaacgtgtagttgccgagcgtgattaaattgtaaggtccgttgtgcagcgcgtccagttccggcgaagcaatcacgcgcacgtcgtgcgcgcctttcattaagcagtgttcgttttcagcttcgaattccagcaccgtcacgtcgtagtccgcgaaaaacacgcgcactttgacaacaatgtccggcgtggttttgctcgtgttggccattattttaataacaatcttttcgcttatatattatactatatttttcgagtttgacgagacgaccttttccaagcgactgcgggtgctgactgaatacgcgaagcgcaccaacgccgacaaacctacgccggatgtgttgggccatgtgtccgatgtgtatgaccacacgtacatcgttagctggtttaggaccaacgacctaagcacttatcacgagactgtgcacgatgacacggttgaggtatttgactttttggaacagcagtttagcggcgcccaagcaacggtcactcagcgcgtcgcgcccgtggccgccgagcttgacgcgttcgtggtgacgaacgacgcgggcgatgttaagttgcgctgcccgcaaaactttagttttgattacggccagttgaagtgcgtgccagaggatccgtgtagcggccgtccacccggccgctaccctatgaacgagctgctgcttgacacgctggtgcacaaccagcactcggacaaaaattattcggccggtgcgcacctgtaccaccccacgctgtacttgcgttgtttggcaaacggctcgcacgcggtgcgcgaatgccccgacaactacacgttcgacgccgaggccggcgaatgccgagtaaacgagttgtgcgaaggccggccggacggttttgtgctaccctattttcccgaggcgttgctagtcaacgagtttgtagaatgccgcaacggtgagcatgttgtggcgcagtgcgccgacgggcaagttttcgaccgcgccttgatgacgtgcgtgcatgcacatccgtgcgctttcaacggcgcgggccacacatacattacgtccgacatcggtgatacgcaatttttcaagtgtcttaacaaccacgaagcgcagttagtcacgtgcataaaccgtgcacacggcgccgatggccaatatgcttgttcgggcgacgcgcgctgcgccgatttgcccaagggaacgggccaacttgttcacatacacaccgacgatacgtttgaatatgccagcgggcaaatgatctgcgacaactacgaagtcgtttccgaaatcaattgcgacactggcgacgtgttgggtgacaaattgtttataaacaagtttaaattaaatgtgcagtttccgctagaagtgcttgaatttggggcatgtgcgccagcgacgcttaacaatgtgagcgtgttaaacgacacgtttccaattgaaaacgcgcccaacgattacggtgtgaacatgcaaacgtccgtggttgggcgaacaagtatggtggcaaaactaatggcgggcgatgacccggacaccgcgtttggcgaaaacgtgttattggcgcgcgatgtaaacaccgtcggccttaatccgttcaccgccgagcctatcgattgtttcggcgcgcaattgtacgacgtgatggacgcccaccgcgccaacgtttgcacagaatcgggcaacgacctgctaaaaactgtcgagtttggcgacggcgcgtttttgagcgtttttcgcgacgatttgacaggttcggacgcggattacaaacaattttgcgcaatatcttacgaaagtccattaaaaatcgtaaaaagtgaccatttccagcgacgtatattgactaatatactacagtcggacatttgtgccgatctatacactacgatttaccaaaaatatactacactggcgcgcaaatatactacaagtccggttcaatataactacactttcgtaaaacggcctgaaaatatggtagtatatgctaaaaatacacgtttcaaaaacgctacgatttcggagccagcgtttgaccttttcgcagcacaaacgactgacaaggaaaatggcttcgcgcggtcgctgttcgacccgtttgcagacggcgtttggcgcagcgagccgggcggtgacggcgatcattgggcaccagaagtgccacctacccaacccgaacctgagttagaacccgaatccgaaactgaactagactccgaccttgaattggagcccgagttttcaccattaattttaaacaaaaaggatttgttttattcttgtttctacgaattacccagttttaaactgagcagttgccatgcggaaaacgacgtaatagtggacgctctgcaacagttgcgagcgtccgtcaaggtcgacaccgaatgtgaattggccaaagacctacattttgtgttgaacgcgtacgcatacacgggcaacaacataggctgccgatccgtgtttgacggcgatgacgtggccgtcgtaaaagaacccgtgccgtcatacgtgtttacaaatttgcaaacgcaatctaacgacggcgtccgttataacaagcatgtacatgttaaggatgggcggtatatggcttgtcccgaacatttgtacgatgacgaagcgtttgcgtgcaacgcggaacccgataaattgtactacttagaaaatatgcaacaataacgtaacaattgccgtatcagcgttagtttcgtaaagttagaaggtaaagagttgtacctaagcttatttgttacatcagcaagtgtacattttaatgcgtcagcgccgacctcgcttttcgagtacgagcgttctcgaaaagcgagtgctatctttagacgtgcgtcggcgccgatccgtttttcgactatagacgtttttgaaaagcgagtgctatctttagacgtgcgtcagcgccgacctcgcttttcgggcacgagcgttctcgaaaagcgagtgctatctttagacgtgcgtcagcgccgacctcgcttttcgagaacgtctgtacccgaaaagcgagtgctatctttggacgtgcgtcggcgccgacctcgcttttcgagaacgtctgtacccgaaaagcgagtgctatctttggacgtgcgtcggcgccgacctcacttttcgagaacgtctgtacgcgaaaaacgagtgctatcttacgtgcgtcggcgccgacctcgctttttaagaacgtatgtacccgaaaagcgagtgctatctttaggcgtcggcgccgtttttttttcgagtacggcgtcagggccgaccttgctttttaatcatgactgttgtttagttgtaactctaaatgacgcaatatgtgtatatataaattgatgcgcgcgcaaatttattcattattatagcgctcgcataatcaattttaccacgttaaagaaaatgcgcaatcatactttcggcacgcgcatcggatggagcgactccaaacaggacccaaacatgtattataattaaaacaagatgtttatgtacaaggtttttaataaatattaataacatttttgtattttattacaattcatatctataaagcaaattgttcaatgaaacgcgccccaccgcaagtcggtagggaatatctcaatgttttattatgtttgaatccaatataacttcgtgttgctaaacttactcaatatcagtatttaatcaaaaccggttttgcgccgctcacaattcacaatgcggactcgctctgtcgaacaagaactcaaattacatttcttcaaaaagctagagcttcggccccaggaacggctaaagcttattgctcaaagtgttgccgacaagtgttccgtaaaaaaatataaaaaattcaagggagtgtcggagatcaagcgccaactgcaacgttacaatttgccgttggcgcagtttaacgaggcgctttatctgtgccgccaacacaatgcagcgtggtgcacaactgacaactgggattgttgcaataaaacaaacaaccggcacgtgtacgaggtggacttcgacgcgaaaagaaaaacaattacggagcgcttttacgtttgcgtgcaatgttttgtttgaataaattgttgtctcgaatcaaaccaatgttttcatttgtcaacttgtcgttttcgcgctgcattttggcgtttttgtccgcccattgggcgtatttatcggttaacgctttgagggcgcgttcttcacgcaatctgttaccgcgaagcgcttccacttgtttgcaagcttcactataatcgctttgggttttgtttaagcggtagtttacttcttcaagggcttgcgataaggctgttgctcgtaattgtaattcgtagttggctcgggtttgctcctcaatttgggtctgtaggcgtttaagcacaatttgcaactcgctcggtttaatagcgttttccggggcgggctcaacgtcgagcaggctgtgttcgaacagcccgagcgccagcgacgcagcatccaccaacccgttgaagcggccgtactctcgcacgtcggcgacggcgcatcgtagcgcgtctaccgagttgcgattgacactgtacacattgaaatgcgcgtttttacgccggcacatggggcattcgacgcgcttgtttgcggctcgctgtgcaattttacgtacgcacatagcacacaaatggtgtttgcacgtgtaaagctctacaatgggcaaaatggtaatcacgtcggcaggttgcaaaaaataattttttacatcgcccactgaacagcaaatgtggcattgaagttttaccgtgtccatttcgcctaagcgccaccgccgccgccgccgccgccgccgccgccgccgccgccggcgttgccgtcgttgtcggcaaaatcggtctggacgcttacgttacgtgaattaattacagcctggggcaccccggcaggtaaaaagttgtttgcgcgcaagatgttgttttgcaaattgaccagttggtagcccaaaaacagagggacgtacatgggatattcttcgtagcgacccaaagtgcgttccaacgcgcgtgtgtcaccttcaaattttaaaacgtttctgatttgcaggcggttgggacgcgtcttaataatgtcagcgctgcgcaccgggttatacaactcggtgccttcaacggtggccacaaggccggtattgttgattatgcaggtgttgcagtttcgcaagcgcaagtcttcactgtcgatttgtagcgtttcgggcgccacggcgcgtctaattaaattgcgcaaaaaaccaggcatgttgttaaaaaccgtatcgccgttacccgcttgatagttgttattgaccacagtcgcgtcgaaaaaccgaacgtcgtcatttgctacgcgtgaacaatacgcctgagggtttgtgagttcaatatgttgcgccgttgaattgtacacgtcctcaacaacgttatacgtgttatctaaaaagttttcattgtttcgcaaagagttgcaaatgcggttaacctctacacggttgtcgtaaattaaatgaaaaattagctgctcggccaacatcatgctaggcaaattaaacacggtggtgtagttgttgctagttggaaccagaatgcgctttgtgcccctctctttgtgacccaccaaatgccgcgctattgttcgcttgtactggttgtcgtcctcgtcgtaaataggtagcaccattttggccattttgaaacgcagtgtcaaatggtaattgcaaataaaccagccatcgtccacggacgcatctgacgagcatggcgacctgtacgtgatgcacgggtcaaacggtgcaatggcgccgaaaatgcagtggttggttgaccggcgcgacgacacgccgggtgacacaagcgccatttcagcggcgatggggtccgactttgtgatagagcgagaaatctcttatacaatcaattttagccaagacgtattgtatctaattttggattcttatataaagaaacactgcgccacgcctccagagcgctacatcgatttgtacgacgttaacaatgtgcgcacacgccaaagcgcaactaccacggaaagcgtgtgcaagaccaacctgcgcgacgaaaagtttgtgcactggctgcgctcagccaacgcactggtgccactggtgtggcgcgagaaccgagaggcggccgtgcctcgcgaccgcgtgtcgcgacacatcgcatcgctgatcgaaacgtttgtttacaagctaaacggcgtcgatgtcaagtttgaacacgtgtacttgcaaagcggcccagcggaccggtatgaatctaccgcggcacacaaaattgccgcgcttaaaagcgcgctgctaggtaccgaatgcgcgcgcccgccgcaaaacctgcaactgggcagcgacgccattctggcgcgcatccgtctggagctggagtttgaagggcctgcgcccaccggcgccaacctggacgcgttgtgcgaattagtggtccacatggaagccgtggccgacccccaaaacatcgcgccgtgcttaccctacaccacattgctcgacagcgcgactccccgcaagtttgcgcgcgagcagaaaattatctacggcgcccaagcgccggacagcacgggcgtcaaaaagtgggcatttaaactggacggcgtgcgcggccgcggcatatttaggcggggcttttgtatggtgcaaacggacgacatgcagttgcacgcggcccacatagcgcacccttttgttctcaacaacgttatcacgttccagtgcgaggtaatggcggacaatatttttgtcaccgacttgctgcaggtgtttcgctataagtacaacaaccgtactcaatacgagtgtagcctgcgcgacgcgtatcacatttgcgcggatgtagcagtggaatgccttaaccaattgcaccttagcgttggcaaagtcacatggccgcagttcggcgagctacgtttccagcaatttttcgatccgccgttggtgccgacgcattacaccacggtagccgtggacggctacattgtgctcgacgaacagctgcagtatgcaaaatacaagtggatgccgaccgttgaactggaatataatgcgcaaaccaccacattgaattctatcgacggaccgttactcgacaaaactattgtggcggattcgcaacttgaacacggaactgtgtacgagtgtgttgtcaccgacaccgtcatcaacgttcttaaatgtcgtcccgacagaatagtaccctctaaagtatgttgagtggataaaacggacaatcggactgatggtgcggcacgcaaccgtcggccgtaaacgagtatgcgctgtttgttaacgtatcacacgacactgtgtgtaagagtacaccaaaatagctacagtgaattacccgacgacagtcccacggaaccgcgtacgtttcgcgaggccgcgtccagccgctgcacagcggcctgatgtgatcttgcaattgttcaattgtggtgatatctgaagaaaaatacataggttctcctaatggagagggtgtcggcgggggcgttggcgaggaagtcggcaagggtgtcgccgaaggcgttggcgagggtgtcgccgagggcgtaggcgagggtgtcggcgagggtgtcggcgaaggcgttggcgagggtgtcggcgagggtgtcggcgagggtgtcggcgagggtgtcggcgggggcgtaggcgagggtgtcggcgggagcgtaggcgagggtgtcggcgggagcgtaggcgagggtgtcggcgggggcgtaggcgagggtgtcggcgggggcgtaggcgagggtgtcggcgggggcgtaggcgagggtgtcggcgggggcgtaggcgagggtgtcggcgggggcgttggcggaggagtcggcggaggcgttggccagggtgtcggcggaagctctttattacgtcggtttattataacatacaaccataatattaaaataataataactataaaatttaacaatattaaaagaactatcattcttaaataaatgttttacaaatttaataactttttatattgatgccaagtcatacgttcctgatgcacaggtgatttctggtttcgctgtatccatttgtactcgttaatgtggttgtgaaacgtcatgctgacgtacgccatgaggtttttcattatcatgtttggcgattcgccgacatctttttcgtttactgctttcgcgcccaccaaatcttgtgcctgttccgctgtttcttcgcaatagaattccgtaaagattataggtgtaccgtaacgttctttgtccaaagccaattctaagcgttcgatgtgataaataatgtaacccttcacgttcatgtaatggtcgcggcacatggcgcattgcaatataaaaaaaatgttgtagaacagaactttcatagtttttagctgttgggccacaaggtccaggctgcttttttctcgtgtaatcatcatgtcgtctatgatcaaactcagaaagtgaattgtgtcccaaatcgtagtaaacgtgtacataaaacttttgggttggcacgaacgcaaattcagctcagcagtcttgtccatgaactcgatgcgaaactgttgcaagtccatgtttggcgacgcgttcgcggcccactcaataagctgttgcacttcgtatttttgtacgtccttgtattttattaaacacgcaaaatggtataaataagttgcttgcgaagacaacagtttggtcaagtgcgccgacttggacgcgcgcaacaagtcaatcagcctgaaggcatataacaagtagctgtctttgtatcgcgaaaagagcggcgtgagcggaatcatggcggacaaagtggtgcggttatatttgtgccaagtgccgccgtcggtggcgttgagcgtcgacgacgcggacgccgacgagccgatgatctacttcgaaaatatcacggaatgtctcacggatgcgtcgtgcgacaaattgacgtactttgccgagctcaaacaggaacaggccttatttatgaaaaaactatacaaacacatggtgctgaagagcgacggtgcctacaacaagcatcacgtgttgttcgatttgatggtcatgtataagacgtatgtgcaactggcggacgaatctgcgtttggaagcaacgtgttgcattactgcgaacaatttatcaccggcgcgttcgaggtgttcgggttgggcagccgcgtcgtggtgttggttccgcccggttgggaaaacgataatttaagtgtacttttgaaacatttgcacagcttgggtttaatagcgatcgacattgtgcaatagcaacatgtggggtgcactattactgttgattttgctggcctttttgttctacctgtggtataatggcaaattaaaccttaactcgctcaacgagtcctcgcccagcctgaatcagagcagcgactcggttcaggtcgacccacaaacggaacagcttaatgttaaactaaataacaacaaactgacgtacatgcgggtggcgcacggagacaacaaggtcagtcaggtgtatgtagcggaaaagccaatgtccatggacgacatcgaaaagcagggtacggctcgcgttggcgccaattccgtatttatcggtactatttacgaccagggcgtgcgatcgcccaacgcgcccagcgcttccaacgaagtgaccgtcacgcgcacgaccgccaatttcgacgtaaaagaatacaagaacatgtttatagtcgtcaaaggattgtccccgggcaagatgactaaggaggacaacatgctgtgcttcaccgtcgacggtctgcacgtgtgtctaatcgacgccaacgcggcgccactgtccgagcgcgacatgcgcgagctacgtcgttccgcgtgcacgctcgtgtacacgcgcaattcggcggcgcagcagcttttattggaatccggctacaccgtggtgaacgccgaacacacggcctaccttaaaaaccaaaagtcctacagagagttgtaatcaatgatacaacacgtcatcgctaagagaagattaaccggcatacatgtttatggataacgtgaagcattaattttggctaaattgcagtgtactacgtaagatgttaaaaaaacacagtttaattaagttaaattttttaataaaatttcaaactattacaactaatgacactaagtaaattttatcaacaagcaattattattttgcgcaagataaatacatttctaaactgttatattggttaaataaatataatcatgtattagcacttaaattgaggcacatttatgttcatatcttgcctgttaagcgccatcgtcaggctattaaacttgcaaccacgctcgtcgtagttgtgtttaaacttgtcttttatttgctgcaacaataagttttcgtcgaacgcaaacttcctcgcggtgccagcgttaatgtttttggccgcgttgtattgtgtaaacgaaggatgcaggaatgatttgaggtgctgcgcggcgtgcccgatcatttcttgcattttttgctcggtcacgaacgtgctggcgctgcgcggaaccgtcttaatgtttagtatatatataatcgcgtacatggggctgttgtgaacgctgaggcgcatcaaattgtgctggtgcacggggtcgttgtccagcagcgtcttgtatggcacgaggccggtctgcggctcgcgctgataccttacgacgtgcgccaaaaacacgcgcaccgagtcttttaacgtgtccactaacatgggttcctgcgggtattgcttggttaaaatgtggtcgtacactgatccggaaaaccgcacgtgcggcaaaaacttgtggtctgtgtaaacgatgaggaaacggttcaacacaccgtcgtcgaaatcgtccacgtatagcggattgttgtttacaatcagcattttgtaattggcctcgtacttgagcaagccttggtacttgcggctcttggaatcgctcttgctagagtcggcgtgttttttaaaaaagctttcgctacactttttcaattcgttaattgtgtacagctgcgagttgagtttactcacttccttgtcgctcgtctccttggactcgtcgccggtgtgcgtctcgccgtcaaacttgtgcatcagcacccagaaatcgagcaatgcaaaaaacgtggatttgccggatagcggcacgcccggcaagtacaccgccttgcgcccgtagtcggtgggcgccgatagacttcccccaaagtgcatcaacatgtacgagctggcgtggttaaaattggtgtaaagcttaaaatacaaatagccctccacgacctgcgttagatacgccagagggtaattttgtacatccatttttgacatgatcacgcgcaggtaaaatcgcgtcagccagctggagagcgtgtccgaatcgcgcgccaaaataattttgtcccaccataaattattgtatttgtgcaagatgttgatcgcgtttgcatagtgcataaaaaatctggccatggcgttgtcaacgttggccgccggggcgggctcactggccgcagcttgctgaagataagccaaaaacgcgtcccgatcgcacacgtcggttatcaaggtgtctacaaactcaattctgtgcagatcacggtacaaaaccgcggcaattttattgtgttctttagtgaaaaaatgcacgtactgcgcaacaaggtcactgtcggtgaaggccaaagcggcggcaacgtacagtttgttagtagcgaagattagcatccacattagctgtttcagctctttgtcgccgacaaacaaatcaaatacgagacacactttgaacgcctgtcggttaatcttgattttctgaacgcacctgcacttgcgctccttaacgctagtgcggcacgcggcgcatttaaagttgtgcacaatgtcctcaactctttttttgttcaagtacaaagccagcgtaacaaggctatcatcttccaagttccacagttctcgaaacaaatcgttgagccgcactcgcgcgtccaacttgcacgctgcgcagtcgcccaacaaattgaccgtgcccaagttgaccttcaccattttgaagtcccggcacagtttagcaatgtggtacgttcgcaaaatgtcgcgctcctcggcgctggcggcaagcatgtgcgcaaacacggcctcgggcaaatacggtgggtctttgggccgcttgaacgtgcccggcatggtggtgcctaacaaaaacgggcaatgggagtaaaagtcgtctgtgatcacgttatacacgccatatttggtgtggtacatgtacttccaattgttaaattttatgttttgcaacttgtacggattggtctccaccaacttgaacagctcgtcgtctcttttaacgatttgataatgctcgccgttgaacacgagcgtcacctgcgtaacaacgttttcaaccttgataaaaaaggcctcccccaacacctttggcggcactttgcactccatcgcgtttttgtacgtaaaagcccacgggtcttcgcactcaagagcgtcgctgctactacactttaagtagataaaatagtgtgcgccaaagtactggcccagcaaaatgtaagggttaacgcccttgaaacagtgccaatggtcgcaaaggctgttaaaggtagaaacgccgcgcgccgtgaacggctcgcatttggcaagcgccgtttcctgtgcgtcgtcccgctcgttactaaacaaggtttcgcacattaattcgaaaaacagcttcatgtcggtctcgcgaaagctcttcttgtcccgctttattatttgcttccacacgttgaacaacaaaaaatgaaagtttttaaagtcgcttgctttgaagtatgtctgtagtaaattaggttcgtcggattggctaaaccccgccaatactttgaccatgccttcgcgcaccttcgctagcgccgcgtctatctcaagctgaatggcctccgcattttcgctgctggcggagagaatggttgtcacagcgggcggccggaacggccgctcggtaattggcgccgaaaccgcgttgtcatttgaaaactgccgcagcttggttagattcacgtcaatgatgtgacgaaacttgggggtcgtaatgcattcttttaggttaatgttgtcttggatggtctcaaacacatttttattcgagtttaccaaattggctatcattttgcacgtggccgtggcgccgttcgccattttaatttcaaacaggctttcgaccgcctttgactcttttccagtcttctcgaaatcggatttgccgtttacaaacagtttaacgggcggcgcttcgttggtgcacaagctcatttcgatgttcaaaaacgttttgggattaaacacgaacaggtccacgggccccaattgtttgttgtgtatgatagggattgttgattccacgcttaagccaaattcctggtacaagtacagtcgccagccggtgaaagacacggcttgcgatgcgggccagttgggccagtaacagtactcgccggcctgcacacacttgttggtgtactcgggtctttcgcttttaaaaaactcgtccagctttaaataatttctaatgtcgtcgtaatgctttttcaacaaaaatggtttaacgaaaacgcaaaaatcattgttctccaataccagcgagtggttcgcgaagggcacgcgcgcttccgctatcggcggcgagtcctcctcgtcgtcctccttgtggcgcgccgcgcgctggtgcaatgcgcacgcgccggccgcgtcgcttgtgattgtgtttaagagctgacgaaaactgtttacgtgctccactagcctgcgagtgttcgtttcggtatttataattatcagccggttcgcgtcccgcagactgttaacagcgtactcctcgtcgtttgtcacgtctttaaaaaggcgagacagaatgctgtccataatggtggttatcgtgtttgtggtggcgctgcttatgtacgtggcgttgtcactgcgaaaccaccatccattcttgaacaggatccacgcgttgctgcgagacttcgacaacacgctgttgtacgggacgcacgtgcggatctacgacctcagcacacccgcgcgcaccgagcgactgtttatcattgtgcccgaaaatgttgtgttatataatttcgataaaacgctctattactacctggactcgggaaacgtgttctgccccaacgagtataccgtggccaaattcacgagcgcgaccatccgtacggtcaacgacacgggcgtctactccacagcgtgcacatccgtcggcagcctaacgctgattgatcactttgtggggctcaagaacaacgcgccagaccacatcctagcgttggacgctgacgaacaaattcagtttacaatcatggacattattaattttttaatttttaacggttttgtcaatttgagcaacgcgcaaacaagtttgctaacaactaaaaataaacacattttttaatttaatttatatttatttataaataaaatttcatcgccacatatattattttcaaatcgacaaccaaatttatttctaaaataatctctcgcaataactctagcattgacaaccatacattcaactctaggatgacataaaaaatttgaaaaatgggccttttgcgtttcgtaatgttttataaatacgtttaacgcttcgtcgtctgcccatttccgcttaaatgtgcgcaacctcaacggcatatctaacgtgtccattgtgtagcgcagttgccacaacaactggccgcctctgtggtagatcgatcgcgcgctcaatgtcaataagctttcaggagttttgcacaacgacgacgggtaatacatcagcaaccgttgcatcaaccaactcatgtgaaacatacgattgtttttaaaagatacaatttgatcattcattgccatttcactttggtaatgtacatattgcccatttttctgtaactcatataaaaacgacaaaatttgaacaaaatagttatacaagtattcaaaaaaatttataccttttaaaactacaagtacattactatttttatagaaattttcatttcgaattaatttgtgaatattactatattcatgcaataagatattaaatgcatgatgagaatacattatgtcatgatgaaaatgaaacttaaaatcaaaaagttctttacgtggatacacgaatttgtctgtataatagttgcaaatttcaatcttcttctcttcaatatatttcttcaacgcgttgcgatagacttgtttttttaaataattagacgctgcagacaacgtatcccaacggtcgtaggactcgattaactttagcaaataatactgccagcaactccaccgacaatacaatacggccatcttttgtgaactaaactaaatacgagcgcgttagcatatatagccagttcatgctatttttaaatttacgtcaacgccacactagttaggtcgtcgtcaaatttatcgtacatcaggaattttatttcagcaaggcatacattgtaattttgtaaaactcgaccaggtgtaaattttgtcgaaaactggtttagctggtgtgtgtaatgtactaaaaattcatttaacacacggtcgtcgctccacttttgctctactattcgtcgcaatagaagtggcatgttcgttgtgtttaccatgtacctcagttgccacaatgggcggcccccgccgtggtatatcgatcgcgcggtctgtgccaataaactttctggagattttagtgaagaagggcggtataatagtaacctttttaataaccaatacatgtgaaacaattttttgtgttcaagtaatcgcatcaaatcggccattatcattccgtttgtgtggtgtaaatattccccatgattttttaacgttttcagcgttagttctgtcactttaaaataatggcccatcattgcaaaaaaattatatactttttcagtaatacagacgcaattagtattatgttttggcgctgtcggtgcataatacaatcggtatatgtcaacaaaatccaacaagttcttgtgcaagtcatagtaatcatataacactacacgatttggtagaaaacatacacgatttggtagaaaacaaacgctccacatttcaaacgtttttaattgaatgaagttttgtaacgcgtcacgacgtatttcattttttaaatatcgcgacaatgcaaataatacattacagcaatcttcgtggggttcaatatacttcaataaacgaaactgccaacaattccggcgacaaaatgatgtgtccatcttcaagtttaaaacaaactggcctgaaaacggtcgttttggcaatttaacgcttcgtgctatgacgcacgcaaaagtgcacttgttttacgagaacggggcaaaatcgcattaatagaatggcctaaaatgtatacgctgtattgtattcctcaatgttgtctataatctggtcgtggtaacgctgccagtcgcgcgacgggacgggacactgtttcacgcgcacgtaatagtcgtacgcgaaattgttactgggaaggtcgtcgaccagcgtgatcgacttaaaataattgacgcctttgtcggccaaaattttaatcaccaccttcggcgacttgggcagctcatcgcccgactgggcgtgcatatcaaacttaaaattggaaggaatgtagcaactttgcatttgcgtgtctgtcgtcgcagcgaacgcagccggagagtcttcagcgattgagccctcgctgatgatcgcgtcaaagtacggcgccagccgcaccgcgcgcaacgaatgtgccacgtgctcacgactaccgtacgaccacaggaccagcacgcagcccaagtcgcgcagctcgctcaggctgtcgtagattcgcgggtcgcgaatctgcacctgctcctgttccgtaattaaagtgctgtccaaatcgaacacgatcacgtgtggaaagtcccatacgagcgattcgctgcgcagcagcggcacttgaaactcgaacagcgtgtgccactctttaaggcacgcgtacatggccggcttgtgctgaaacacgcacatgtggccgagcaccggcgtcttgaacgcagttttcacgtggtgccgcacgctgcacatgtcgtcattggctttgaacatttgcaaacagtagcgctcgttggacgctatgacgcttaaaaactgcgcgttgctgttcaactgaaacagcacgtattcaaagtactcatactttctaaaccccaagaatttgaggtccgcgtactcggccacaactaaaacatggcctttgtaaaaggcatcgtgcagccgcaaacacgcccagttgcatttcatgctaagcaatggacgcctcgcgccttattcacggtgtttgccgagtttcgggccagcaagaactacaccaaactgattgagttcttgactagcaattttgcgtgttacgtaaaaaacaaaacgttcaactttgcgagcaccggccacctgtttcactcgctgtacgcgttcgtgcccaacgttagcgaactagtaaaggagcgtaagcaaatacggttgcaagtagactgcgtgatgcgactgttcaaaagcaccaccaacgattttaaaatgtacgtcgaactgtttaatttcatagacacgcacggcggcgcggattgcccctgtttgttgctgcagcagagcaagataaatgctaaaagttacgtagacagcttaaattgtaaacttttcgacatcaaaccgccaaagttcaaaaaagaattgtttgacaccatattgtccaagtattcgttaaattacaaggctttgtggtttaaaaagaaggaaaagtgcacaattggatgcaagcgacagaaaaaaataaaacggcgagaactactaaacaatagaataatttatttaaacgacaaaaccgcgattttcgacgactgcaaattgctgaaagggccaagcgggacgagtctcaaaccctgccgtcacaaattcgccattgtcgagcgacaaacacgcgccggcgacgagatggtgtcctttattcaatactgcgagctgtgtcagatgaccgcttagtagcggcgcctgcgatatccggcgcggcgggtggcggaccgactgcgccggtaggtgcgcggcctgccggggcggcgtctgtaaccagaactcctgcggcggcgtctatagccgccattggcggatcgggagcggcggcggtagaccatggtgctagagttgtcaatgtagctttagtttttaccttatattattttttgcgcttggcggacatgcccaaataaatgtccaaatcgtcattgtcctccgccgttttatttgcatgccttttaacactctcggcgcctttgaaaattttattgtaatcttcgatgttaaatttgcaattggccaccgcgtaattttccatggtggtgtagaacatagagtttgccgcgttgtagtacattctagacaaagggtacgggtccaggtgcttcaacagcttgttgatgaactcgggatcgtcgcagaaaggaatctcgctgccgctcgtaatgtactgttgcggctgcagcttttgaatgttgtcgccgcgctctaccaacaactcctccagcgtggtgcgtttgtcgcggcccaccgtttcgccctgcaataacacaatcttggcgtaacgcagcacaggactggcaaagcagcgaataaacgagctgcgcataacgtcagctgtagtcatgtcgatgggagtggccggcatttctagaagcgtgcgcaacgtttgcagcagcgaattggtctgcatttccgtcagttgcggccggcacgtattatcttccatcgccgtttccagcagcttgaaaagttggtggtagccgtcagaacgttccaagaatatcatggtcatgaccacatcgcgcaccttgaactcgctcgacgtggtggtatttagcgtgtagtgttggatgaggcggcgagccgccgcgcgatagcgtcgcatgtcgaccaaagcggacttggcgcttggcgcgggcgccaagccgccaaacacggtttggacggtcgtcgcgggcacaggtgcggcaacgcgttcaaacggtccccccgccgcgaattccgacgccgaagcggcgttagcgttagtgaacttggtttgggacttgcgcgccaccgtaattaaaaaccccatcaaggtgttcgtgtttaagtcaatgtcggacacggtgtcgctgcacatgcgtagcaactgcggccaaatttccatttgcatctctacgtcgatgagacgtcgcagattatcaatgcgcttgtgcacatcggtgacgctcatggcggcggcttatgatatgttgaccacttccagttgattagagtaaacgtcgctcaaaaactgcagcacgttagccgtgtcttcgcgattcaacttaattgtgggcaagttggcctgtagcgactcgaccagcttgcgcgccgcgatcgactggttacccaacgtggtgaggctggctattttgttttcggacgcgtccttgacaataaaagacgctgccgtctgtgcgccgttcatgttgtgcaacatttcagcggcggccagctgcacgggcgattggctgcgttgttgcagacgcgcggaacggcgcggcggctccgcgctatcgcttatcgaagcaatcatggtttaggtcgagcagcagcgaaatctcgttgtccaattgataatcgacaatgacgcgccttataaacgtttcgggaacgattttctcgaaaatcaacacgttcatcatttcaattctgatttttttaagtttttccacaacaattgcgacgtctttgtccgcgtaccgcttaaatatgtaccggcacacgttaagtagctccagttcgccggcggaacatggctcgtcgcgcgtgtcgttgtgcccggcctccaaaagaccgcgcatgttctgcagataatgaccgggcatgctttcgatgtagtggcgtaaaaaaaagcctatcaacacagtcgccgccactttgtttacctttttaattttggtgtgctggcccatctttatcataaaatttttaaagggcattaaaagcttaggcgcggtggcccccgtggacgcgttattgcattgctcgttgagcatggtcaacaaacggtggcggtcctttaccggtaaaaatgaaataacacgcttgcagtccttgactagcggctcgcacgctttttgtttagtgtgcattgcgtatgctttgtcacacaacaaattgtaaaaaaattgcacaaacatttgcgtcattaggttgttttcgttgaccacatcaggttgggacgtaaaatccgtcttcaggatgacgtagatcatcaacggcatgccgaacatgggccgcagaaaaatgtcccagccatcctgcaggcccgagtcgagcgtagtcagcgcgtttgacacatagtcgcatttgcaagttaaacaggacactttgcccaggggtcggcagtgctcggcacacataaaagcatgcgcgtcaggcgttgctattggattgtaataaacttttaaatactccatgatagttttaaagtgcggcacttgtttgataaattcgtcgcgcaaaaacatacccataatgcctttgatgccatgcaagttttccgaatcgggttgtgcctcaaatttggctttgatcgcaactatgcatttgttaaactctgtaaagaaagttagaccttgcacgtcgataagctcgtgctggttgaaatactttgccaacaaaaaagttagggaatcgatctcatgatggtacatttgcgcttcaaagcgcacgtgctcgaagcggtgcccctgctggtgcaccgcattgaacctcaaattgtaaaacaatttgtaagtgtgcatgttgcattcgatataaccttataatggacgagcagaactcgttacgcatcgccaaactggcgggtgacataatgacgcgcggtcacgcggacataaaaacgattatacatagcccggagcgcgcgctcggtcaaaaacttgacgctatcacggccttagtcgattcgatgcaacctggcgagccgcccgaaacagacgtcgaattccaaagccgcgaagcagacgtcgacctcagaagcatattgacacggcaagatcgcgtgttgcgccaccgcgtattgcaaattgcggttacgtttttgttgaactcaccgcaagtaaagttgtccaaaaaagttttgcaatctatgcagattgcgctcgacgaatatacagcattcgtgactgaaggcggttctgacaacgtaaaagcagatgactttctaaaccgcgcagaaaccttgtacaaggagatacgccctaaaatttttaaatttattaaacgcgccgaaaacttttctatagaaaatgtagtgtcacttccaccaacaacgggtggctcaaatgcagcgcaacaaattaacgcgccacaagaattgcccgtaattacaaacgagcaagactttgatcgattaaacattgagcaattgacagattacattaaaaacaattttgtgggacaattcgatttcgacaaacacggcagcgtcgaagacgtgcgcgattttgcgaaaaccgtttggtggcaaacgacgacatacacggcgcccgcgtccatgccgtcgccgccgcaaacgcccgcgtccatgccgtcgccgccgcaaacgcccgcgtccatgacatcgccgccgcaaacgcccgcgtccatgacatcgccgccgcaaacgcccgcgtgggcgacgccgtacacgtcgcccacgcgtatgacgtcgcccacgcagcagggtcgccaatcaccgcctgattatacttgggaagagcgtctccgacagaagtttccggaaatcgaatcatcgttaccagaaaacgtgtcgttgccagatagctctgacgaagagcctttcattggacaaagaaaacggcgacgccacgtgcgaccgctgacgccatattcgccaagaacgacgcttggaaacgagtcgtctcaagacaatgagccgaggcggcgcgactcatattcgactgaaaaagagagcaaaacgccgaacaacgagttattagcgccatcgtcagacgaggacgagcccgatcacgagcgggaacgaaagcgtcggcgtgaagaagacaaaaactttttgcgccttcaagcgttaaagctgattgagtatgccaacgtaaacgagcgcatggaaaaaatcgtgcaggtaaccagagccatgcagaaaacttacgactactgcaactgtaaaaacaccattagcggcacgcctgacgcagcgaattttgtcaatttgttgcgccggttgaacacgtacaaccttagccacgttgaaatgacggttaatttttacgaattactgtactcgctcacactgtacaatgacgagtccaatagcattatcaactacatattcgcggctgctaaatattttcaaaactgcgccaaaaactttgtccgcatgcgcgccgagttcaacgcgcacgggccgtttgcgcaaatcgagtcaatggtcatgtttgtaatcaaatttaattttttgtgtgacctgcaagctttttttggaaaaatcgacagtttgccaacgctgggccagcccaacatgaatatacacacggtgctggtgatgcgagacaaaatagtcaagcaggcgttcaacgcgctccagtacgacacaactccaaaaattgacaatcggcgcgaccccaagcacctgcagcgccttatccaacttatgaacgccgactttaacataatttaaacatgactttaaaagttttttatttgtaacaaacattgtcacgatacaaattaaacattgttttagtctttgtggtcaaagttgaaacgttctctagacaaacaaaaaagcttgttaaacatttgtttttcgttctttcgtcctccggcatcacaggcccgcgcttattgagcgcgtacatgtatatgctgcgcaacacgtcggcgcgcttcggagttcggcgatcctgttcacgtgttttaacacaatagtcaactcgtcgttaattctaacttgggtattttgggcaatgtggacttgatgtggttgtccttgcagttatcgcgcttcaaaaaaataccaagttcgggcgatttgccagtgtacaatccggacaaagcaacgttcaagtccatatgtttaacatcgtttccctcggctcttatgtgtgtttacactttaacaaatagtcgttaaacccaaactccataaaagtttcttggtcgcattttgaaaattcttgatagtcataatcgctgtctccatcggcatagcccttggcgcggctgcccgtgtcaattttaatgtacaccattgtgatactttgtgtggttttgttattaacagcattgcagcgtaataaggctgttgaaaataggcacaataaatataataaacgcggtaaggattgtatgtaattgtgtataaataaaataatgattattactattaaacattgttttatttcctgtagttatttaagacactttagcgtaaacacaaatggccgctcattataaagtggtcgatgtcgacacttttgcccgccagctcattacggacaagtgcagcgaattaattgaaacagaaaacttgttgcccgccaacattttgcacgttgttaagcaggcgagggacaaatactttgaagacccgtcaccaaaaaactacgactatgtcaaaaacctgtttttgcgcaccaaatacatggacgattcaatcgattacaaaaattttaaccgccgcgtattgctcatcgtgtttaagtttgtgcttaaccgaggctccggatacttttcatcgtacaaggagctaattgaagtggcggtgaagcgcctcaacaaaatcaaccccgaccttaaaagctcgccgcgcgccatgctacagcattacaacgagtgtttggaaaacctggacaacccagtaagtgacgaacaccacctaattacgtttggcaaagaagtagccaccaaaatattcattgaagcgttcgagttcagctacgccaacaccaacgaaatcaaactgacgaccagcagcctcaaaacagatttctttagccccataccaatgcccgcgccatcgacttgtctgttgcgcgacgtgattaatcagcgcaaacgcaagttaaaagagtcggaagagtcacagccgaaaggggccaaattgacggccgagccaaaaaatgtacatggcgaagtctcattgctcgcgtcacagtccgctacgcttcgcacatcgcatgcgcaacagccactgtttacgttgtagcgctgctcacacgccaggcggcgcgtaattttttaacagcgcccgttcaaactgtgcgcgctcagactgcacagcgtacgcgttggttaaaacgacaaccaacaaagtgaaaaacaatatgatcataattataaccaaaaatccgcacaagattagaacaaactccttgataagcgaccgattgcgcgttacaaattgctcgagttggtcaccgtcggtaggcgtggcgttgttgcgaatgacttcgataatggggttgccggcgcggccgcccgtcaaacgcgaaaccacgtgcgacggtgtggccattcttacaaaaagtagttgtattttacagcgtgaacagtaacgccgctcgtgaagacaccgtccacggccactcggttggccgccctttttatgtgcgtaatgtcgtcgaagtccgcattgtcaaatgtgttaacaggtgccacgtcgggcatgttgactggcacgcagcctgcggttgtaatggccacgctgtcgtttttgcaaaaaacacgcacgcgattgacgtccgcaatctgtccagtactggtgtttaacgaatttagttttacgatcacgataggcacaagttgatacggaaaaatgagttgctggaatatgcgcacaaactcgaccacggtttggctacacttggcaatgtgcagcagcgtctgcgcgtctttgacgtactgcagacttgcgcggttgacggtggcgcaattggacgggatgtcgccgcgcagcaagcggcgcgtgcgctcccaattgagcttgttgtacaggctgtcgatctcttcgtgcggcaggttgattacgtagcgtgcaggaagcttgcggtattgaaaaatgcaaaaaactcgtttcagactcaaaatcttgaccatagtgggcgtttctaagttgaagcatagcaaaaacttgtcgctctccgtcagctccttaaaatgtgccagcggcagttcgcagtttataggccgcagttcattgtagttgagtggaagcgcgtgcgcgcgcatgtctacaagctttttgggattcatgagcagtttgcacgccggctgcatctccagcccggggtaggtgaattcgatggggcacgtggggttttcgtggtgcacgatcatcgtgttgcagtaaaacaagttgttggtcaacagcacgctaaagacgcgcgtttcgcctgcgccgatctccgtgatcggcactagcgggttccagtacacaacggtggccgcgcccgtctttttgggcgcctggctattgccgttgtaattttgctcatgcttgtacaccagcaccgagcgaaaccgcggaaaattgcgcttttcgacgtacagcacgtccgcgtccgtaggaacgtacacgactaggttttccgtgggccgattgccgacgtcgctttgtggttcgaccagactgtaaggaaacgcgaaaaatctgtcgctcacgcaaactttaatttgaaacggacactccatttcatagcataagccttacatttacgactgccaataaaaacgcgccaatgcgaaaacgccgtcacgttagatgtaacggctatttcaatttgcggaccttgaccgtgtcgagaagcgcggcgggtatgtaattgtactggtaaaacaagtcgcgccgcacgcgcgcattgttcacaataatgaacacgcaaaaatagatggcgtacaaaaatatgattattaaaaaggaggccgacaggaagtatttcattgttaactcttacggtaaatgaaacaaaatatttaataaataatttattgttatttgcgtttctttgtattttccttgttgtaatcgctgtgactgcaaaacttggattcgtgcgcgcccggtgagttctctctgcacatcaacttgcgaataaacgtcacgttttcgtaggctgccgcggagatgttgccgctgtgcagcgtggtgggcgcaagcggcttgcgcgcgttgttgtaaaaatgctgcagtgcatacgaatccatgttgcagaatgcaacgatagtgcattacgtcgcgtttttgtagtcgcaatacgcgcaatgcatcccgtccaaaaccgcgtccacagccgtgtcttcgcttaatgccgtctggccatgtataaatctaaattctcggcgtccaacatacacaaacggttgccacacttgctacagaacaggtcgccatacgtgcggtattctggagcgtgcagcgcgttgcaattgccgcatacgcgatgatattgcaaattgcaatctaccaaatctttcatttcgccctgctccgcgctgacgcacgtgcacaaatcttgcatgatagcagctttttgtttcaacgacacggtttcgttttcctttaaaatgtacatgttacgcgtcgggttgtaattaaggcgcggcatgaacaagagcacgtataaattgtttagggaattggtcagcatcaaacgcgcgcaatggaccatgaacgggctgtgttttggaagcgtaatgcttgttgtcggcctggcttgctacggcgccgccgtgatcaacaaccagattagcacaatttcgcggtcagtggccgcgcagttacacaaccaagaacagctgcagcgtcggatagtggcagcgctcgccgccgagcgcagcgccgattttaactacccgctcgtaatgggctctagcactgtgatgatcaacgtaaacacgtttgcgcacgccgtcaacgtcagcgcggtcgacgctgcgtacttctcggcgtgcccagccagcggccggtacgaatcgtacctggcccagttgtacaaactgccgcgtccgcctcacatcagcaacgtgtttctgtttgccggcggtcacggtttaggcaagacttacgccagctaccagctcggccgggcactgagcagatttgccgacacggtagttatttccgttcccatgaacacctttggcaacattaacgacgcgggcgcgttgatggcttcatgggaggaggcgctacagggcaaatgttttattgtgtggacgttcgacgagctggactcatacgtgatgcggaaccgcgacgacatgcgcgataagaagattacgcagtttgccgaatacacgggctttattaaaaacgcaaaccgtgtgctagtgttcacgatgaacaacgcggaaatgctgttgcacgactactgggcggaccgcaaaagcatcgaggccaattttacgaattacgaacacgcagacgacctccgtcgggcgctcgcgttcacgcgcacggatattggaacgtttttgcaagaggcacagctcagccgactgcggtcatttgtgggcaacaagcttttcgtatacaggccttttattgcgcagactgcaaaagccttcgccacacaatatttggcgcacgcacacgtcaacgcgtctgtggagacgctgttcgacgacagcgcaatgttttcggttcgaaccgtcaaaattacgttggacgacataattaacaaagtgtaactaatagacaagcgtttaattgaatgccctgttaaccgcgtccttgctaaaattagtcagcggctctttttcaatgtcatagttcataagcgcgttgtacaccttttgcggtgtccagctacacacttgctgtttcagttccataaacattctttcgtgcacgttcataattaaatatttaagctggcaattcgtagcgttagtcaccaacatgagaattgcaaaatccaaagcggccagcttgtaatcgtttgcgtagcccttgtaattgccgaccacgcgaaccactttgttgttttttacgtgttgacatgcgtggtagtatgctcgcatggtggcgattatcgcttctttagcgcccgtgcgcatcgtgttgacaaacataacattgcctaacttcaacttcttttttgcgtcatccaacttgtataagttgagtgcgctgacggcgaaatcgtctggcaagacggagttgtaaaggcaatatggtagggcgtttagctccaaaaattgtgcgcacagttcggtttgctggctgcccgaattgtttaagtaaagtctgttgttaagcgcgtagcacacttcgatgtccgtggacgcgttttgatacgacgccctgttcacattgtgcacagtaatattactggcatttatcttgtttttaatgggcacgtatggtggggtaatttgtgaaaccggtggcacgacgtgatacgttacgcgcacgtttttttccaacgacccatccttgcttttcatcaaacccaaaaaattcgacaagtagttttcaaaagcggccacaaacgcggtgctctcgtttttgggcaagtaccaagcgttgttgttaaatggcagtaaggcggtgtaacacaaaacgcaggccaattttaggtgtgtcaattgtatgttatcaaaagtatcaatttgacagttatatgtaaaatttaacactttgtttagttctctgtcgtatttgctcgcaatttgatcgccgttgggcagtattcttaacaagcgttgcttaagctctaactttgactcaacatttttcgtaaaactaattttattaatgttgttaacgagcaactcaaggcttcgtatgtcacatttatgaaaatacggatcggcgttgttcacgccatgtaaagttttaagcaggctttgtaaccggtcgcccaagtggcctaaactaaaataacccgtgccgttgttgttgacgttagcatctaaatactccaactctccgagtaccatacgttgaacaaacaaatacggcaccggcgtgtccatgtcgacgctcttatctacgtttgcgcttaaatgtcacgcgctggtacaagttagccatgtgcgaaggtatgcacaccggaacggagcgcgccagcgccgtttgccgaaacagcaatttatcgaaaccggagccgcacgtgcacgcttcggccgagaacggctcggcgtccagcttgagccgcagcgagccggcgtcgcataggtaaggcctcgcgacacccgcgtcgtccaccaaatctctgtacgtgcttacgcatgtttgtgcaacgacaaagtcgccgccggccgcgtgaacgcgcagcagccccaacgcaggatcacattcattcgtggagtccggaatttgcgcttctgccaaggcgttggtcgcgctgcaaaatccattatcgcaagctaaattgctcgccgcgctggcgatcacgcagttgtcgcgacattgttgatccgtcacacacggcagccgatttaatgagcagtctacggctcgagtgcgctgaaacgcaaactccatcagcggcgccatcgccgcgatctgcctctcagtcgcgtcttcttgcatgaattgccgaacaaaatgcaacgcataaacgtatacaatcgtgaaaacggctattaagaacagcagttgccacacggtcgccatacttagtttagcagcgaaactgcccgaggatgtcgtgcacggagccgacgccggtggaaaagctaatcgccagcattgaaaaccagctcaaaattaaagatgatcaattgcgaaagaccaacgaattaatagaaaagtacatgagcatgctggaggagaaggacaaacgcattcaagagctgtacaacagtttgttggagatgtccgaactgccgtgcaataccccgccaaaagccaccaaacacccatgctgtgcgtggcgcgcgaattcaattgtctgcgcgccattacgggccaaaaggtgcacatcgccaaaatgaagcgcgagctaagcaacgcggccgagctagtcatcgacttggtgcggcccaacccgcagctagactttaacaattttgtaaattacgtggaaaataaatttagagaaaaggtgcgtattcgcaataagcgcaacctggtttttgagacggagaatgacgccattacaatggcggctatgtttaaagcgttagtcatcaaaaaaagcaaaacgtgtttcggcgctcgtatataacgcacatccgcccgctttccgtagttgtcatgccgctaacggccaacgtgttatacgtgtctaacaagttagactacgtttttaatttagaaaaatgtattgttgtcgagcagttgcaatgttacaacggggactctttagcattggttttaactaatgacacaattaaatgtccatcgcagctggtgcacaccaaagacacgttcgaaaattcgcgcttggaattgttggaaagcgcagtgtgcagcgcgcaaaccgtcaagttgctccactcgaaaatgtataacattgtgaaactatatgatgacaactttgcagactaataaacgcggcaatgtgttataacgcaatacatacaattagtcattaaatgtcccgattataatctaataaacattacacaacaaaattactggtttcattattaagcaatgtatattccaattttaatactcgttttgctattgatcatcattgcagcggcggtaatgtacgtcaaccttattgacgtgcaccacgaggacgtgcgccatccgctgcaaatgttcgacacaagcgacgtgccgctaatcgaaccccccaacgaaatagtaatcgaggggaacaacctcgaatgccataaaattctgacgccgtgctccacgcacgcggattgtaacgcgtgtcgcgaagggttagccaactgccagttgttcgacgaggatacagtggtgcaaatgcgcgatgccgacaacaacgagcagaccgtcaccattcgcgcgggcgaatcgtactgcttcgcgctgaaccgcgagcgtgcgcgctcctgcaatcccagcacgggcgtctggctgctggccgagaccgaaacggggttcgcgctgctgtgcagttgcctgcggcccgggctcgtgacgcaactcaacatgtacgaggactgcaacgtgccggtgggttgcgcgccgcacggacacattgcaaacatgagcggcgacattcggtgcgtgtgcgatgaaggctacgtgagtgactacgacagcgccaccgaaacgccgttttgccggccgcgcacggtccgagacgcgctgttcgacgaggcgttctttccgcgcgcgccgtgcgccgacgggcaggtgcgcctggaccaccccggcctcaacgagtactatcggcgctacttccggctggaagacatatgtgtggtagacccctgctcggtggacccgattagcggacgacgcacgtcgggccgtttgttccaccacacgaccgccgacggcgtcgaagtgagcggttgtaactgcccggctgccgacgggctgctgcccgtgttcaaccaaatcgccgcggactcgggcatggtgcgccgcggcgaccgcaccgtcgctaacgcgtgcttgcagccgttcaatgtgcacatgctcgcgttgcggcacgtagactacaaatttttttgggcgcggcccgaccacaacgagctggcggacgcggacgtggtgtttcaagcaagcgcgtcgcagcttagcgacgcgcgctacgctgtcatgctgtacccgttggtcaccccgcaccccgacgtgaccgaaatttcgttggccggcaccggcgtgctaaagatatccatatcctacgataccgtgctcaagaacacgctgctgcccgcttccctgtttaggctgtttaaagacaaggaacaaggcacttcagcacccgtgtgcttttttcccggcgagggccgttgcatagtggccaattcggacgcgtgcattcgtagacacgccaatgggcaggtgtggacggccgagacgtttaccggatcctggtgcgtactcagccgcgacggccccgccatcaagatttggagccgcgccgggcgctatccgcgcggcagcgcgccggccgcgctgcgcctccgtggattctttctaaacaacgaccgcgagcgcaacacgatgcgcgccgtaagcacgggcgacatgaccagcggtgcgcaaatagacgcacttacgcaagtgctcgaaaccttttctaattattcggtatagtgaagatttacaaatttactcgtattacacattataatatatttaaatctttaacaaaatgaagtttcgagaacgcgtacgtcaacgcgacacgagcgactttacaattagtctttattaaaacgtcgagcgacaagactattaaagattactttcaaaagtttgcttttgttgcaaacgtgtcctagcaagctcaagtttgctacaaaagcaaattacataatattgaagcggggtttttaattaagtcataattatgagtatggctcaagtggctgaagcgtgcaacttgcacgctatttttgtaaaactgggctatttgtttcgggccagagtttgtttagatattgcgcttgccaacctgaaagagctgcgacagcgcgtttcaattccagaagtcgccaacatgctggcccaaaaggaaacacatttttgtttgttgcaaaaagaattaaacacaaaaatcgacaacagaattttaattaaacttcacagagtcacatgacatttaaccgtcgcgccaatccatatgcacgcggcattgctgcaattttcgctcggcggcgttgtacgcccccaaacgcgggcgcaaaatgggagcgcctgccaagtgaccagtgtgctttgacggtggggccagcgggtcgtggagcaccctgctagccagcgcggcggccgctagcgcgaaaagaattgataaaagtttcatcgtgcactgaagctgtcctactttccgcactccttttataatcgccggctgtcatgataagatgcgcgcgcgcgtgttaatttgataacgcgcttttttgccacactcctcttgtcggtcagtataagagcgcacggtggtcgcaatgaacctattcaaccgctgctccgagtacatcaggctgtcaagcgacacccgaacgcaattttcgttagccgccatgtcgtacgtaaacgtgacgctatgcgcgtacggcgccgtcgtcgcgggttatctgtccacggtcaacacatttgcagagctgcagtttttgcagtactggtttatgctgtcactttttataactggcctcttcaacgtgacgctgtttttgcaccggaagaaaaccgaggcgcacgaaatcgtttacgagctaaaaatgttacacgccatgttctttggcaacgcgttgatgcattacggcgtattgaacacagaacaaagcgccgtcagcgcggtgttgatcgcgaacttggtgcattgctgggcgttggcgctgctctttgtggagctgattgtactgttgggccacacgctgggcacctatagcaactaccgctacgcaaaggcttgcttcatagttgtgctattcatatcggctgccgttacattaatcacaatgggcgcgaacggactgaaaacggcgcctttgtgcgacaacctacccatgatcgcgttgttgggcatcgcgtatttgctgaccgccatcgtgtggcggcgcgcaaggaagccgccggttctaatctgcagcgagtgcaaatggtgccgttcaacgacccgccgcctacgtttgccacagtgcaaatggaacatttattgaaagaaaaattataaaacatgggtgacagtgaaaaaaaataaatcgtttcatcaattacattctttattactttagacatattttcttggataaaatttgatttgtgaataaaaattatttttatcaaagccatcccgctaacttttcaatgttgataataaactctgtgattgcgcaatcacacttgaaatctttattgttttcgtaagacttagacactcatatcaggctaacgcgcgtcttcttcaaatgatgcccaccgtcgttttctatagtattatatgttttaattatattttacatgggattaacacacgataataaacagttatttgcatcaacaaatgcgacaaattcgtttgcaaactttttagcgagttccaccatcatagaacagtcattttcggccctgtggcacttatcgccggccagttgcgtcacatgcgttttgtacaaatccatgagcttgaacgagcgcgccgggcgatcgccccttttccacggacactgtcgaacagtcacgagtcctgacttgctgcgattcatggcggttgaaccgctgccgtcgatgatggcgtacatcgcgtggtatgcatcggcacagtgcacttccagttgaaaagcattgtccttcaggtgtttgtacaaaatgggaaagtcgaacgataagccgttgtaggccacgaggcacaccggcgacgccaacaaggacaaaaacgattcgatgcagtccaccacttttgtgtcaaattttggctgaccatttaaattttccatgctcaattgcgtcagcgccagcgcttcttcagaaatactcaaagtaggttcaaaacacattgttaatttgttgcagacgcgcaccgcgcccgggcgcagcaactcttttctcgacacacattgcaagctaagttccgtgatttgagtcttgttgttctgaaacttgggcagcccggtcgtctccaggtctaaaaacacataggtttgaattgggcccatgttaaacagaaactaaaaatagaggcatcagcgaattctttatataaccattacgtacatgcgatcgccgcacatatacacttcaatgttgtagtcgtcatcaaataggacggtggcaatcgaatcgggttgggcgtcaaactgagacagatttgcgtcaaaaatgattgccttttcatctattcgcacgtcgtcgtcagcgacgcgaactttcgatggcagccggccgcggccgcagcgtgcttcgtgttgtagcagcgcgcgtgcaagccgccaccatccccagcgacgcgacaacacgcggtccgaccccgcgtatggcaaattgagcatgcccaatgccacggagcgcggcacgtgctcgttgaagaactgttgcgcggcacgcgggctttcgaagcgacacaactcgcccacgtacggacgcgccgggtcgtcattctcgatggcccaatatgtcgcaaacgcgtcgtccactatcggtgtgtgcttaaaataatacacaaagcggtccgggtgccgcaacgcccggcaacgcgtcgcggcgctcacgcccacaatttccacgtgcaatttaaacggcaaatacgacaaaattttgtctataatttcgacgggcaaatgcggaagaatcggaaaaaattggtgacacatcttgcaacgcttgcttggcaactccatatttactactactgtacgaagcgggccagtctttaaattactactcgcttttagagaacgctcgtatttgtaaagcgaggtcgcgctgacgcacgtataagatagcgctcgcttttcgagaacgctcgtgccctaaaagcggggttaaatgtactcgtttttcgagaacgctcgtgcccgaaaagcgaggtcggcgccgacgcacgtctaaagataaccttgtttttcgtcgtactcggaaagcgaggtcggcgctcacgcacgtctaaaaatagcacatgcttttcgacaacactcgtactcgaaaagcagggtcggcgctgacgcataattaaaaaagctctcgcttggtacagcgacgctgacgcatgtttaaaaaacactcgtttttcgggtacagacgttctcaaaaagcagggtcggcgctgacgcacgtctaaaaataacactcgcttttcgggtacatacgttctcaaaaagcagggtcggcgctggcgcatgtttaaaaatagcactcgcttttcgggtacagacgttctcaaaaggcagggtcgacgctggcgcatgtttaaaaatagcactcgcttttcgggtacagacgttctcaaaaagcagggtcgacgctgacgcatgtttaaaaatagcactcgcttttcgggtacaaacgttctcaaaaggcagggtcgacgctgacgcatgtttaaaaatagcactcgcttttcgggtacagacgttctcaaaaagcagggtcgacgctggcgcatgtctaaaaatagcactcgcttttcgggttgcacactatagttcgtctttaattttaacgtgttcattcatagcatttaacaagtcgccgttgtcggcgtcgatttcccaagcgaataacccgcccaatccgttttgatctacataactattttttgctaatacagaatcgacactgtcaaaagagattaaatcgcccttgtctttgttaaaaacgtaagccgctttagcgaccgaatcaaatttgtaaatgtacttgttcaattcgttttcaatttggcgataatcgacaacgccgtcttcccaagtgccggtcacgggcccggcagctgtgcctgtgaaatagttgtcaccgtcatagcccgccacgcctgtccaaccgcggccgtacatggcaacgcccacaataattttgcgcgggtccacgccctggttcgtgagcaatttcacggcgtgatccgtgttgtacagctcgttcgggttccaactcggcgcgtagagagtggtttggtagcccaaatcggtgtttgaccaggcgcctttaaaatcgtagctcataagaaatattttatcgagaagcttttgcgcaacgtcgtactgtaccacagcaattttgtcatagccggaactgattgcgcttgtcaactcgtacgttttgcccgtttgcagttgtagctggtccagcatcgcgcgcaattccttcagtaaaatgttgtacgtgtcggcgtcgcgctccccgttgccaagagtcgggttggcgcctttgccgcccggaaactcccagtcaatgtccacgccgtcaaaaaacttccacacctgcaaaaattccttgaccgagtccacaaacacgcgccgtttttccgcatcgtgcatgaaatagaacgggtcggacaacgtccagccgccgatggacggcagaattttgaggtgcggattggccagcttggccgccattagctgaccgaaattgcccttgtacggctcgttccatgcggacacgcccttttgcggtttttgtattgcggcccagggatcgtgaatggcgactttgaaatctgaacgacccttgcaggagcgctgcagcgcttcaaaactgccgggaatggttttgagggcgtcgttgaggccgtcgccgccgcaaatgggtatgaacccgtacaacagatgcgagagattgggcagcggcactttgtctaccggaaaattgcggccgtacacgccccactctacaaaatacgcagcgacggtcttgtcctggcgccgtccgggcttgttgttctcccgccaaacgtattccagcggagacaaatgaccaccgtccgtgtccgcaactttgacggctaccggttcgctcacggagcagccgtcctcatcgcacaccttgacgcgcatgctgaactgtccgctcttgaagacgttgaccgtggtccttttagcgacggcatcgcctttccaaacttgtttatcgttaaacagcacgtaagccatgtcaccgattccaccattccacacgttccaagaaacctgcacgctgacatggtcgttgcgctgtatcaaattttcataggcagtggcgtcggaattaattttgactagcgcgtagttgcgatcggcccaatcaatgaccggtgtgccaggcaacgcgtttgcaaccgcggcggtaagccacaaaacgtttaccaaatagtgcaccattttatttttatacttataagttattattatttaatgtaacatcatgaacaaaattgtgttgtatttgttggtctacggcgctgtacaatgcgcggcgtacgacgttttgaaagcgccaaattattttgaggactttttgcacaaatttaacaaaagttatagtagtgagtctgaaaaattgcgccgttttcagatatttcggcacaatctagaggagataattaacaagaaccacaacgacagtacggctcaatacgaaattaacaagtttgcagatttatcgaaggacgaaaccatttctaagtacaccggcttgtcgctacctcttcagacgcaaaatttttgcgaagtcgtggtcttggaccgcccgcccgataaaggacccctcgaatttgattggcgccgcctaaacaaagtgaccagtgtaaagaatcaaggcatgtgcggcgcgtgttgggcctttgctacccttggcagtttagaaagccagtttgcaatcaaacacaatcaattcataaacctgtcggagcaacagctcattgactgcgactttgtggacgcgggctgtgacggaggcctgctgcacacggcgttcgaggccgtcatgaacatgggcggcatacaggccgaaagtgattacccgtacgaggcaaacaacggcgattgtcgcgcaaacgcagccaaatttgtggttaaagtaaaaaaatgctacaggtacatcacagtgtttgaggagaaactaaaagacttgctgcgcagcgtgggcccaattcccgtcgcaatagacgcgtcggacatagtaaactacaaacgcggcattatgaaatactgtgccaaccacgggttgaatcacgcagtgctcttagtgggctacgccgtcgaaaacggcgtgccgttttggatactgaaaaacacatggggcgcggactggggagagcagggctattttagggtgcaacaaaacataaacgcgtgcggcatacaaaacgaattgccttcaagtgcggaaatatattgaaatatattgaaaatacattgtattaataattttatttgctaaacattaatatacaattgtattaataactttatttgataaaacattaatatgcacgactgcgattacgcaccatacaaaataaaaatattattactcccactgttagcataaagctgaacgcatgtcccaacataaacgaccatagtttggcgttaagctcgcccttagccatgtcggtgatgtcgctaagactggtggtgtgcccgccaaacttggtgttctccatagtggaaatgaggttggatttctgctgggcgatgaacgaccagccgctggcatctttccaattctcgtgataggttgtgttgccgattgtgggaatccaaaactcaatatcgtcgtcgatggccagctccttgtagttgttaaaatcgatacactgcgacgaatccgtattggcgacccagcggccctctttgtaaatgctattgttgtagcagttgctcgtgtgcggcggcgggtgggtgcatggcatcaacaggaacgtgtcgtcggacaaaaacgtggacgagaccgagttgttcatgaggttaccgattagccgctcgtccactttagccaccgatacaattagattatgcagcatgttatttaacttgttgatgtgcgcgtgcatcagctcgaggttcatgcgtagcagatcgttttcatacattagctcctcctgtatatgcatcagatcgcctttggtggcgctggcgccctcgtcgtgtttggcggacacgtcgtgccgccatgttggcggacgttgctttacgacgttttccgatttgcgcttgatgcaccggttgaacttgcaaagccacgtgttcttgctcagatcgaaaatgtcattgtcgacaagacagtgctcgcgtgtgaccgagcgcgggtcagacttgtcgtcttttatgagcaaacacgctaccttttcggggcgcctcgaaaacgttgacttttgcttcaagaccatactcacgccgtcgcggtgtagcaccgtgttctccgtcacgttaatgctggcgccattaatgtccaaaatagtaaccttgcattcgtcattgtcgttgtcacactcgaggcgtgtgtacatcttggctgtggacacgccgcaacgccaagaacggttgcacgtgtggcgcgcaaaatggttgttgttttgccgcttcaccaactccttgccgaacacccacacgccacggccgtctttatttctaaaacagttgtcgctgtcgctgccccactggtctatgagctcctcgcccacttcgcattgtcggcgaatgctccacatcagcaggtcctctttggccacgttcagcgtttccatagtttcctcgatgcgcgtgttggggtccagcgagccgccgttgtacgcgtacgcttggtagtagcctttgtagccgatgatgacgttttcgtccatgtttgtttctacaatctcgatttccacgtctttctgcagcgtctctttgggcggcgcgatggacagattcttgatgcgccaaggtcccgaattcatttgagcgttgcaatgctcggcaggctccgaaaatcggaccaagagcaaaattaacacagcagttcttaccatcttgtagtgttcttgcgacgaggacgatgcgactgatttaccagaacggcgcaagcctttatatacccatgcttatcaacacgttggccggcgtacgtgactcggtcggcgcgcgcctaatcttgagatatttagtatcttatctttcgataactgacagtataaatgcggcgacatgttcggcaactcgcattacccgatcagctgcgctgcgtgcaacacctcgacgcgtattttgggattgtatgttcttgaaacacattattattttccactaaatgtagttatcatcttgtttatctagttttggagattagatacgactgacgcatcacaaggtgaggcagcatatttgactacttgcaattgattttatattatagaaatttcatcaataactttggcatagcttgcagatcagcatcgtgctggttcttgtataaacggcacgtcgctgaattttcggtacacctgtccgtcgccgcttacgattttagtgccctcgccggatttagagtaaacagacttgatggaatttgcgaccagctgatcgtcggtctccaaatagatcgttttgcacacgtttagattggtggcattgtcccaacacatggaaccagtgttgtctaaatttttcccagcatctccatcattaatatgcactcgtacaccggatcaataacaacaaacgtgcacaccgcgcactgactcggttagtcaaatagtcgcccattgtaatagtcgcccattgtaagacgtacattaacatggcaagcaccgattcactcgacacgcgcacgttcgactacgcttccgacagcagttttgaagtaatcataatcaccaatgcgccacacgattacgatggctacatagaattgggcgccgcggcgcgcttgttggctccgtttcaaaaaaatatttccgcattgtggacaaacgcggcgccgtcgcacaagcttactagaaacaacaaaaactacctgcacgtatttggtctgtttaagtatttgcaaaattacaatttaaacactaaaaaacacccgcccgagtattacaccatcaaatccgtgatttgcgacctaatgatgggcgcgcagggcaagacgttcgatccgttgtgcgaaataaaaacgcagttgtgcgccatccaggaaagtttaaacgaggcgatagtgacccttaacggtcacgcagcggccgatcccgcgcctcggacggaagcgcgggaattggtcgagtcgctgcattccgagtacagtaaaaagctcacgttcgccaccgacaccattctcgatcacgtaaagagtatcaaagacctcgtgtgtctcaataagtaaggtaatttagccatgaatttttgggcggcctttagcgcgtgcttggtggggtacttggtgtactcgggccatctgaacggcgagttgcaggaggtcaagtccattctgatagtggcttacgaagcggcggagaggcgctacaacggggtgatcaacgaaattgaatcgctcaaaacagacacgtttataatgctgtctaacttgcaaaacaacaccatgcggacgtgggacgtcgttgccaaaaacaacaaaaaaattgctaaccttgacgaaagaattgacgggctgttattaaaacacgcggcgccgacacttgtctgataagtaattatcaaaaactttgcgcttcaactacaatatcaattaatatgtcgtcttgcatggtgcccaacaacaacgtcatgtacgatgacgcgtcggttatctggatcgactcagactacatattccaaaacctcaaaatgccgcagtccacgtttcagcaaatcctgttttccatcccgtcaaagcaccgtaaaatgatcaacgacatcggcacctcgtgcccgtttccgcccggcaacaacacggtcaagtacatggtggacatctacggcgcggcggtgttggctttgcggtgcccctccctgttttccgaccaactgctcacaacctttatcgccaacaactacatgagctactgcaatcgtcagcgcccgtgcccgccgcagccccagccccggtttgattgcgcgcaaagacaaataatggacgcgctggaaaaaattggacaccaaaacgacctgctcgtcaacggcgtcaaccaaatttcgctcaatcagtccaaccaatttttagagctgtccaacgcgctgagcgcgctgcgcgcgcaaaacgcgcaactattggccgcgattgaggcctccaaagacgcgcttttagccaggctaaatacgttgattgacgaaatcaagaacgcattgcccgacctcacgagccaattggaagagttggccaaagaactcacggacgccattaacggcgtgtcgcaaacgctgcgcagcgagctcaacaacaccaattccatcttgactaatttggcgtccagcatcactaacatcaacggcacgctgaacaacctgctggtcgccgtggagaatatcgagggtggtatgagtgacgcggacaggcaaaaactaaacgacgtgctggatttggttaccgaaataagaaacattctgatgggcgctcgcaaataatatgcctaaaattgagaaaccgtaccgccgacgccctggcgttaaagccgaggaggatcagacaaccgagcgcttgaaccaattcaaggcggcctcgggcaaatatggcaaacgcgtcggcgaaccggaaaaaaaaccgcgacttgccgccttcataaacatcaaactgaaccacgaagccacgcccgaaatggaccgacggtcaaaaattttttatgaacagcaaaagccgtcgatattcaacagggccaacgtggaggcctttattaaaaagtgcacgtttgttgtagcgttcgcgcaccccacgtatccgatggaatacaataaaatttcaaatactaattatttaaaaatttattgtatgaaaataaacacagaccttttgttcaaggacaaaaaccaacaaatgctaaacgttttgcgggcttcggcgttttgcgtgcaattaaacgaccaactgcccttaacagttgcgagtgtcatgtacgacaaacagataaaacaattagtgctgtccgtatattttactcaaccacaaataatagagtggctaccgttgaaaaagtgtgtcatatattttaacacgctgtcgaccgtggagtggtcggtgccgtcggatttactgagcgcgtttgtcaatttgccgctaacgccgccgacgtatgcgccgcataagacttagcgtcacgcccaattatgcacgcgtcgcttaccgcagagcagcgcgccgtgtacgacaaatacaaatttgccacgtacgcacggtcagtgacattgacgcgcgcgcaactagacaaatggcgtgagaaaaaagtgatcgttccgacgcccgtgtcgcgcgacgaaaccttgcgcgtggaggccgccacgcgcggtcagagcaaaaacgcattgtggaacctgctgcgcttggaccgcagcaccgcgtcgcgctcgtcgggcggcgtcgcgttgcgctcgtctgcgctagcgtttggcaacgcgcaggaaacgcaagtcaaagagggcaacgcggaattgtttgagcggctgggccatcttgccgcaaagcacgtgggctgcgccgttgcggaaacggtgctggactgcggcatgtttgtcagcgaattggggctgcactcggcctcgcccgacgcctattttgctatggccgacgggtcgtgggtgcccgtggagataaagtgcccattcaactatcgcgacacgacggttgaccagatgcgcttggagctgggcaaagctaatcgcaggtaccgtgtcaagcacacggcgctgctcgtcaacaagacgggtttgccacaatatacagtggtcaaaaagcacgatcattatcgccagatgcagcggcaaatgtatgtaatgcgcaacgcgcctgtatgtttctacgtggtgaggttcaagcagaacctggtggttcaggcagtgccgcgcgacgacgatttttgccgcaaagaaaaagactcagaggctgccgagtttgtagctttcgcgatgggaaacgcggggcgtgcacaattcaaacgtggcaagctacgccacgcatcgtttgcacaaaacgccgccgaccacgcttttgccgcggcgcaggtggacgcgctggtgcgccgcgggctgtatttgttgtacggacagctgcgctgcgcgaactgtgacgggttcgtacttgacggtcgcgcgtcgttcgagacggccatggcgtatacccacgagcaatgtgacgggctggcattgcaagagcaccaatttgacaacgttgcctttttagatttcgacaaacgttacgccagccttgtcaatgttcaacaaaataacgcccgcgcgctcgcggttgaaggctactacgccgactccgaaggcgccgttaaaaccttttgttgtggtgtacgtggcagcgctgcgtcgcggcaccaccttcctacgtgttcatattatttagcggtaatttataaaccagacagggttaaataaaatgcattttcatatttatatttttattttatattacacaacattaataaattgtttggacacaaatgtaattttgatttcggcgagaattggcccttccttgcccttgacgtcggtgtacttgtttttattcaacacatttgtctcgtatccaaccggtttgtgattaaacgattcgagctcattattaccgtcatcaggttcgtcgaagcccccgtctaattgtatgcgggccccgccatccgtttcccaacgcggagtttcttccacccattctttaatcacaatgtccagcacgggggtttggttaacaagtctgtttagctgttcttgatcgtgttgcaccaattgcttaatctcgttgaaatcgccaagcttgaactgcttcgttcgcttgctggtcttgtcgtagaatccatcaaaagttggattgcaatctatcaagcgaaaaattttttcgccgaacttaaaaattgctaacactcgttgtccagtcttcactgccaccttcaatacatggtcactgccaatatgtttatcgtacgtcacatttattttcaatacgtcggaacgtacggcatgaaattcaacatattcttgctgtttatcatcaaagtacacgaatatttgtggagttttcataattgacttgcttcaccgggcgactgaaacaaactatggcaatattattcgtttcgccttttatagtgcattaaaataatcgctacgcgctttacaagaacgtgtatgcttaaaagacgcgattggcgcagtacataaatgcgaaagttgtttcgttttaacattgacaatttttcaagcaaacaaaatgtacgtaaaaatggacgtaatttacgacgaaaacactggcagtttacaaatgggcgataaaaacgtgtttattaaagtgttggagccaggccaggaggtttttgacgaaactttaaaccaatatcaccaatttcccggagtagtcacgagcattgtgttccctcagttgttaacgggcacgacggtagacgtgtttacggcgagcggcgcatattcggggacgctgaccaccacttgcttcaactaccacgtgtgcaacaaacgattcgtattcggcactgttccggcgttggaagtgcccgacgaggtgcgcaaccatttgcacgtcggcgcgcccattacgtgcgacgacaagctggtgtcggtggtgaccacggtgtttcggcgcgccgacggcgtttggctactgcccgtaacaggggtgcgccaggcggaccaggtttccgggcacgcgtttgttcaaaacggcgtgcgcgccgagcgcttgggcaccggccggtccgtatacggcacagtgcagctgccgtacgacaaactaaaggcgcacgcgctttcgcagacggcgccacaagctgaagcctccgagtcgtgcgcgctgttttacaacgacgccgaagtgcgcattacttttaacaaaggcagtttcgaattaatgcactggcggttgccggggccttttgctggccacaacgttaaataagcattattaactaattattattatattaagataacaatttcaatatcatcatgtccaagcccagcattttacaacaaattttgacggccgtgcaagatgtcgacacaaaagttgatgcgttgcaagcgcagctgactgaactggacggcaaagttcagccgttagacggtctgtcagaacaacttaccgctttggacactaaagtgaccacgattcaagacatacttggtggagcggaagttcccgatgtccctttacccgacaaccccctaaacaaaacccgcagtcgcaagtgattaaaaaagcaagtcgatcgttttaaagtactcgtacggctctttgactaaatagtatagtgcgagcattaggaatattgcaaaatacacaaaaaatgtaagctttttgtgcaacatgaaggccgcaagagcgactgctgtacctgttaaaaataaacttgctatcgctccattaaatctgttgttatttttattcatttccaacaacgtattctgtctaaacgtgtactgcataaactcgaggcgcgtgtacagcgaactgctggccagcgcctggcccacgagcgtggcctcgtcaaaatcctcgattgcattgctttcggtaaagtgcagcatttgtccgtccgagttcacctcgagcgcggccacgtagtcgagcaagtgaaacagagactggaacgtggcgtcatcgtcagtttctactacgtccgaaaaaaactcgggcaaaaactcgattatttcgcgcgagctgttggcgtccagcgtttcaaaataggcggtcagaaacgtgcgcgacaggtcgtcgggaaactcgcgcggaaacatgttactgtacccaaatgggtcccacagcgccaaaaccaaatccgccagtgtaaacaagatgagcacaatgcccaccacggaactggctttgatagcaatgcgcgttagcgccttggccgccgtggtgagcgttttgatggcaatcctgttcatggagtgcactatcgccgccttgtatgtttcgcccaaaaggcgcaccgtcacgcgctgcgaggtgctcaccagcatacgtttgagggccgggatgagggctgtgttaatttttttaagcattgttttgaatgctgtcaacaacatgtcgaatccaatatcggtcgcgatgccaaacacgagcgagtattcttccaaaaacgaggcgattatcgcttcgagctcttcgtcgttgagctggcgaccgggcgcgccaaagtcacggacggcgcgcggtgttacgcgcgccgagtacgcaatgggcgttttggcaaacccagtttcggccgtgtacgcaagctgcatcagcccgccgttgtcggctagcaggccgagctgttgcagcgtcggcgcctccgaaaactgcttttcaaagttccaatctactgcacgatcacgcacagcgcgccattgggccaaaaccgcgttggaatctgccacgggccgcgccggtaacaagggcgagggcgccgtatagtcaaaatcgcgcagttccgaaaatatgttgttagccatcattttaaacgtcacataaattgtgtcgcccagcacgaagccgatcagcgactcccaccaacgaaacgagcagccgccgttcatgagatcgcggccaaagcgtcggcagtacgcctcgttaaattcgcctttgaaccgctcgggaaacagcgggtcggggtcgggccgcacgttgaacgcgggcacgtcgtctacgcccatgatggtgtgctcctcggtgcgcaggtaggggctgttaaagtacattttcgacgtagaatcgaccagcacgcattggttgttgggcgtgtacgtaaactcggccgactgcacttcgttctcggcgccctcgcgcatagcggccgcgcggtccaggtgatagcacgcgggttgcgagtacgcgacgctggtttccgaagtttgcgtgtacgcgaactcggtttggttggatacaacgcccgtttcgtggaaagggtaacaactcatgctgtcgcagcctcgccgactaaatgccagcttgaccgcaagcgcgcggtcgcgcagcttaggcggcacgtagtaatcatcttcgctcgacgcgggccgcagcgtgtaatcgataaggatgtgcggcagtcgctcgcgccagcggccgatgaactcgagccggtgcatgtgcgccgcgtaacggctcgcgttcgtaaggtcgacggcagtgagcaccgccatgtttgtcgcttattataaccgagcacgactatgattatttaagtgctccaaacaggtgatctaaaaacggccctttaaaaatgcgtcaccttgtttttcgggtacaaacgtaataaaagggggtaacatgcgaccccgtttttcgttattgactttactgtagttttataaacattttaatcgacgaacacttggggttggcggggtactccgaagatcggttacatgttcatacgttcgccaactttgagcctaaaacgcaagagaaaagagacaaattgccgtttgccaatattaactaaataagataaaataaaaatttgcagattttgttgtaaaagctcaacaccatgcaaatcaaaacaatgctgttgacttttgcgttgctcgttgcgctacacgcgcattacgttgtagcagcttgctccgaaactggcgccgtttgcgtccataacgacgagtgctgtagtggcgcatgttcccctatattcaattattgtttaccgcaataaataatgaaataattaaaagtgcatttttaatactttattgataattattcaatttcataattttccaaacgttcccgacaaattttagcgtgcaattttaaatcgtaataacgaatgaactcgccgttaattgcgtgcgtctgaaccgcctccgcgtgaaaataaatgtggtcgtatttatttttgaaaatgtaccggttagtgaacccacacttgctgcagttgatgattgggttggtataatacattttgttctttttgcacgaaatgcaatggccacctttaacgggctttaagggaaacgtgacgactccggtcacaaattcttgaatagcgaacccgtatatctcggcgaacacggtgccttgaattgcattgaaggttccgttatctatcgtttccattagcgtgctacggctgctgacggtgaagcaattaacgtcgtccgaggccgttggttccttgtaaatattgcggtagcgcatcagccggacgttatcgtttatcaccttcaatgcaatgccgcccgtggtgcgtaacgtaatggaaatgatgtgctcgttggggcgtttgtactcgcgcaacagtcgctgcattattttaaaaggaccgtcgtggtgcacaatttttatgtcgttgaacgtaaaatgttctaacctaaattcaagcggaaacacgtattggtagaagaaaccggacttgaacaggcgttgtgcgtgaaccgagctgatgccggggtacacttggtgcgagttgagctggtcgtgatagttgtcggcacactcgcagcaagcaaattcaaaatggccgggcgcgtcgggcgaaggcggcgccgcgggttcctcgctcgcggagagcgagcgcggcggatggcgcacgatgacgtacagcatccacacacgcgtgttttccttgaacttgtatccgcacatggtgcactctgattcttgcacgtgctccagcccgtctttggtctttaggttggccgcgcggccgaaagtgagcatgtctttgctgttaacgtagcccaacacataattggtagcaaagcgcaaaagtgacttcatggcctcgcgctcattgtcgctcaaaaagtgttcgcgtaaatcacgctcacacgcgtattccaatttgtgactgcaagccggcacgttgtcaaacctgaaaccgtattcgggcggcacaaggctggcggagatgtcgttcaacttgtcgctgccgcgaccgatgcgtttgataatggccgcgtgcgcctgctcgcttttgttgagcggtttgaccctgcgcgccgcgggcgaggccggcccttgcgtagcaacggccggcttgtcagcagccgcggtccgtgacgaccgtttgtcaaaaatgttgttttccctaaaccacttcatgtcaggcctcgaattgacacaatactgtgcatgtttgtagccattcgcgcttatataccgtttgtaatatctggcgcgttgtctaatctaatcgcgtgtgtcatgcgcaattgcgagccgttttgcacacgggccccgaccttgtacgcattatcttatcgcgtgcgtcatttgttttgcagccgcgaagcgtttgcgcacggccccacttagtcacgtaggcccgctgctatataacgagcgttaggcgatctcgaaaaacagtttaaatccggcagcgcgttcgtgaacacacaatataagtgatgactgcggcgtgacgcaacatgataaaaggcacctactggcccaacgttgtttcggaaagctacattgagtcgtgcgaaataaacaaggtaatggacattaattttattttcgaccatatgtattgtgacgacattctggtggacgctaaagcgcaagccggcgtgcgcaccgcggcctttgccatgattgacgctaagcatatagagctctacaagcgccgaatcgaaaacgggttctttcgctatcgcgaccggtgtgataacgcgtccgcgctcccccaacgcctgcccgtcgatgagggctgctgtcaccacttcgtcagcgatgccgcgcgcgttatcgagtgcgtcaagagtgtggaaaccgccagcgcgggtcataatgtggtggtgctcttgccgtacttgaaacagctgcaggttgcgctaaaagtactaagcgatgctttcgcgtgttgtgccaaagtgattagcggcttgcaattgtacgtgcaagacctgctttcgcattgtttgctatgcgccgaaaaaattgaggcggccggccgcacattgcaaatgataaatctgtttttggacactaattcgctgtacgagtgtgatttgtgcaaagaggcgtccaccgacgctcgctttttaaagcccaaagagtgctgccagtattcgttgtgcaacgcgtgctgtgtcattctgtggaaaacggccaccactcacgccaaatgcccggcgtgcagcacgtcgttcaagtcatagtaagtgcgtaccatgagcggcgacaatctcatagcgctggccaaggaccagttcaagtatttgtttctgagcagttattttgacttgaaagattttagccatgtgccggccgaggcaaaagcatttatcagcaactatttggactgtcactttcgcgtgctcgacgataattcgttacaaaactacatttcgtacctaaagagcatccagctgaaacacatgatgggcggactgctcacgcctgacgtgtacaagttcatcaagccgcagtttcgctttgtgtgcgatcgctccaccgtggacattttggagtttgactcgcgcatgtacatcaagccaggcacccccgtgtacgcgacaaatttttttacgtcgaaccctcgcaaaatgacgtcatttctttacagcgaatttataaaagtgtacaaaagtaggttgttcgccaacacaacaaatcacgggtgtgtgttagcgggcgccgccgggtttgtgtttgaagatgcgcacgtcgattggtccggcgtgcgcatgtgtgcggcccctaggctagacaataaccggcacccatttcgcctctatttgctgggtgaggaaatggcggcgcactttgtgggacacaacattctaccgccgcaccccgccaacgcgacgcgaattaacaatagtatgtttatgttaaaaaacttttacaagggcttgcctctgtaccgcttacaatatcaagtagtcaacagcatgaaattcaccacgcgcaaaccgaacagagtgtttgatgaaatcgacaaagagctgaacagccattctcctttcgtaaaactcatccagcgcgattacatttacgatgcgcaattcccaacggacttgctggaagtgctcaacgaatatatgaccaggagttcaataatgaagtttatcaccaagtttgccatagacgagagcgcgtccacaaacgatatgctgcgcgagattgttttcgaccgctacgcggttgactgctaccgcaagctatatattaaaatggagttgactaacgtgtttcccgccatgtatgacaacgagtcggcgtatttgtttataaatagagatttactgcagctgaccggcacgctgaacgcgttttacgcgcccaaactgcgcattctcagcattctgtctgtcaaccgcttgtttggcgcaacagaaacactggactaccaccccaacctgttagtatatcgccaaagctcgccgccggtgcggctgactggcgacgtgtacgctgttgataagggcaaaaaaatatttttggtaaagcacacgttttccaacacggtgcctgcgtatcttttagtaagaggtgattacgaaagtacgtccgaactaaaatcgctgcgcgacctcaacccctgggtgcaaaacacgctgctcgaactgctcattgtcgacggcccagcgtcgccgcaaacactgtaaagctcgcctaaaacaaatatcatgatttacaccgaccccgccaccggcacgaccacgaacaccgacgcgacgggcaacggttatttaaacaggttgacgcctaacacgtttctaattatattggctgtggtggtgatcgtggcgcttgtaattatttttatacaatctagcagcaatggcaacaacagcagctcgcctggagccaccccgcaaatgggctttccgctgaatacaacgatgcgcgctaacccgtttgtggccacaccacaacgcttgtaaataagtagctttgtaaccaagcgttaacatgagacgcgtgcggtgcaacaaggtgcgcaccgtcaccgaaatcgtgccctgcaatgccacaattcccaaaacgtacgacttggccgagtttgacctaaaaaacctgtcaagcctcgaaagttttgaaacgactaaagtgaagctggtattgagcaagtacatggccatgatcaacacgctagaaatgactcagcctttgctggaagtgtttcgcaacaaaagcgacacgcgccaaattgtagcggtcgtcctcgccaccatgggctttgtacacaaccggtttaacccgttggtgacacactttaacaacaagatggagtttgtaatgacagaaaccgccgacacgagcatccccggcgagcccatattgttcacggagaacgatggcgtgctgctgtgcgccgtggaccggccgtctattgtgaaaatgctaagtcgcgagttcgacgtggacgcggtcgtggatccaaaaacgcacgatcacggactgcgcattgccaaaacgctagtgtccaacaagcgcaagcggcgcaccagcgacgacgacaacgagttcatcaagcaacccaagacctttaacgagtacaaccggtgcatggacgcgttgtcggactttggcatcaccgaaaccgaagcgacgcaatacttgacactgctgctcgtagtcgagcacgcgtacttgcactatttcatatttaaaaactacggggcggtggaatactcaaaatcgctgcttgaccattccttgtttgtaaacaagctgcgctcgtcgatgagcgccaaggcgtacaatttactcttaagcaagttccggttcgccatcgaggagtttgacaaaatcggcggcggcgccggttctagatttacagtgtacaactttaacaaataaattatgatactactagttttgtttttagttttgctcaaagtgctcatttttaagcgcctcaatgagatgcacctggattcgcaccacaacaaaatttgcccccgcggctattttggcttgaacgcggacccgttcgattgcaacgcatactacatgtgcccgcacagagtgcacatgttttgggacccgggccacgagttcgacctggattcggccagctgtgtgcccatcgaatatgactgtttgggtgcgggttgcacggcgcgcctgtatcgcaacctgttgttataaataaaaaacactatttacattatatttgtttaatcaatcgcacttgttgcaatggtctcctctaattgtaccggactgtcgtttatgtgtaaatcggggcacagcaaatttaaaacacccacgtcctggtggcgggtgcggcagttttgcaagttgttcataaaatgggagggcacgttacccgctagcgacataagcgttttggggtaaaactggtccgggcccgagttgttgtgtacgcgcaaacccttaattttctgtgtgcgcttggcctcggcgcggcggcgcacactcaacacgtgccacgcttcgggcgcggcgcggccggcgcgcacaattacgaggcccagcggcgccgtgtatttgttgtaaacaaagagctcgcggaacagacacggcgcgcgcacgcaactgaggacaaatgcgtctttgcgtgcacccatagccaactgcatgctaatcggtctgctgttttcatatccgcttaccaacagcgtcttattgggcgccgttcccgcgcccgatttaaataaataaacgataacgccgttagtggcgtgtggcatgtagaactttatatcgttatcttgttcaccatcgggttggtataaatagacgttcatgttggtttttgtttcagttgcaagttgaccgcgacgcgcgcagtacctcgcaatgcctaagaatatggccgctttacaacagtctctgtacacgggcccgtccacgccaagccacacgcagttcagcaggtccaccgaatttcctgaaaatttgaactttgacgtcttaaacgattcttatgaaacattctcctctgtaagcttgacaacagccgaacaagataaccaaattgataagattcttcaagaatccgcagctatgaatcgcgatgtcaatagtgagctggcgcagtttactgcgtcggagtatgtgaccggttttcgcgccgatacgatggagcccgaagtgatcgtggaaacaattggagacagcatgaaacgcaaagcgtctgagctggacagcgactccgacagcggggagtcttcaaaaggcaagaaacgcgtcatcaagcccaaaatgcgccagcgctacaagaaagccaccattcagaacaaaacttctttgactgaagagtgcaattataataccgagatttgcaccgtggcgcctacggaccaaattgcggaatattttaaacatgacttttctgtgtacctggagaagcagaaaagcgattgtcaaatgagcgccaaccggttttcggattacatttccgagactggctattacgtgtttgtcgttaagaaaagcgaacataagccgtttgaagtggtgtttgcaaagtttgtcaacaacgtgactaacgagtacactaataactattatatggtagacaatcgcgtgtttgtggtgtcgctgaataacgtgaagtttatggtgtcgtataagctagtgcgcgagcagggcatcgatattccgccgcacgtgaacctgtgtgacgacgcgcaggcagagcgcaacccctacgattgctattttgagccggtcaaaaatgtgttccaaaccacgctgatcaaccattttcacttggacatgtactattctcaaaccacctttgttacgctcatgcagtccatgggcgagagcaagagcggtatgctgctgaacaagctgtatcaaatgttccaagaccgttccctattcacgcttcccataatgttgagccgcaaggagcccactattgagaacacgccgctcagcaggaattacacgtcttcttacgtggcgcagatcatcaaatattccaaaaacgtgcgctttcccgaaaacaatccggacaacggcgttattagtcgactagaggagatcgtcactcagaaatcatcgctgacttacaagtacagtagcgtggccaatctgttgttcagcagatacggtcatcagcgtgacaataacgcggacagcttaaagaaggtcaaaaaggaagacggcaaccggctgctggtggaacagtacatgtcgcaaaacgagaacgacgagaccagtcacaattttattgtgctgcagttcggaggcgtcaacgacgagcgcctgaccattgccaaaaagggaattgaatttttctggatcgctgccgaaataaaagacatcaacgtggacgatttggtcaaaaaatatactcgtaacgtgcaccacgtgtttagaattataaatgtaaaccggcgcgaaagcaccacgtggcacaataacctgttgaaattgctacagctgttgttgcaaaatttaattagaatagacgacgtgcagcaatattctaacaaaggtgatagtaaatttatctataaaagactgtaatatacacgatactcaacaaaagtgatagtagatttatttttgaaagttattgtaaaaaataaatatttgcatttaaatctgttgttttgtgctattatacgtttgttgtgtgggcgggggcggtaatacgatgactggcggggcgcgggccgcgcccgctgccccggcgccgcctttaattacgaatctgtaaattagataaatgatgagacctaaaaataacacggcgccgatcagccaaatgagaggcataagcttgttgctgacgctgtcgctagaatttgaagacttgcccactaatccgtcttcgcctaacaaatgatccaagcccaagtcgccaattaggtcgcccaggttgtacggctcaatgcacattatggtctggccgggtagcaggtcgctaacgtccacaaactgcggcgagtcggggtctgcggcggggtcgctctgccggcacaccgtttgctcctgctggtagttgaacccgctgcagatggcttgcagctgcgccgtgtcggcgataagcgggtcatggttacaaataaccacgtcggacgtgttcatgttggggtcacgctggcacgtgcggctgagcagcaggcacgcgtcggccgtgtcgccgccgtcggcgccgcgcacatagtaactgccgccagtgttgttgagcgcttgaattatgtcctgcactagcgtcgccgcgctaaaggtgaggtaagcgccgccggccagcaacacgcccacgccggccgttttggcgccctgcagataggtgttaaggcgcgggttctgctgcagcgcgcggtccacgccgtcggccgagcgcacgttggtttcggggaagttttgcttaaccgcatcgctgcgcgtgcgcttcacgtgcaggcccgcgtcgggcacgttgtcggcgcgccgtagctggtttagcgacccgatttgcgggtcgctgatgccctggaacacgttacggatgcgcggcacatcattgccgcgcgtaatgcggttgatgtcgcccgcgctcacgaactgattgttggacaggttgtagccaggttcaaaacggccgttgcccaagttacgcgtgctgggcgctctgagcacatttgtgaaccccgccggtgtagttgtcagcaggcgcgtgttgtcggtcaagaaggtggcttgattggggtacactttgttaaccctgcgcagatttgtaaagaaagtgctcatgtttgcgacttaatatgacttaagtttcaatgcaatttaattattggcatcagcattgaccccgcttttcaagtgcgagcgttgtcaaaaacaagcgttattaataacgtgcgtcagcgccgaccttgcttttcaagtacgagaaaacaagcagcgccgaccttgcttttcgagtacgattgttgttgaaaaactagtgttatctttagacggcgccgacctcgcttttcgagtacgattgttgttgaaaaacaagtgctatctttagacgtgcgtcagcgccgacctcgcttttcgggtacgattgttgttgagaaaactagtgtaataggttaaatcgtgcgtctggttttgatgacgtgcgtcgcgtgcgtcagcgccgacctcgcttttcgggtacgattgttagttttatctttagacgtgcgtcggcgccgaccttgctttttgatacgattgaaaagcgccgacctcgcttttcgggaacgggtgttctcgaaaagcgagtgctatagacgtgcgtcagcgccgacctcgcttttcgggtacgggtgttctcgaaaagcgagtgctatagacgtgcgtcagcgccgacctcgcttttctcgaaaagcgagtgctataaacgtgcgtcagcgccgacctcgcttttcgggtacgggtgttctcgaaaaacaagtgctatctttagactgcgtcggcgcctgtctgaggcattcgtttttcgagaacatctgtactcgaaaagtggagtcggcgctgacgcatgtctggcatttatttcgaacatctgtacttggaaagcgggatcggcgttgacgcatgtctaagggatttgttttttgagaacatctgtacttggaaagcggggtcggcgccaccaacacgtgactaaaatatttttaaacacgtccgtacacgtaaacgtatggcactcgtacccgaaaagcggggttggcgccgacgcatgaaatgtatcgacaaaagcatttgccgttgacagttgttttttagggttgcacaggtatataaagacaaacagtttattaatacagtttattaatatataaaacaatgttaatatcaatcgcataaattccattaggtttgtttgctgacgcaaaaactcttgcacgtaagtaagcttttgttttaaagttctgcgcatctatctggctttgcagtttacgattacgttctttgagctgctttatgtctttttgtatgtataatttgaattttacagcgcattggtgtttactgtaatatgttggaataaataaataataaataaatgtctttgtttacctagtaaattttaagtcaatgtgttttctaatagtttcttgtatttaacaaacattcccagagccaagaggagctggagctggaactggtcgacgtcgaggatgagctggcgccagagctggaactccctcgacggttttcgagggccatggttgccccaagctgcttggacgccatttcagcacgcatggacgccatctcagcacgcaattcagccagttctgcctgtaatttttggacgtcattttgttcgggcactttgctgtcagacatgttattgtccagcaactgggcccagtgtgtcttgatggcttgtttatcgcgaacagccctcgtcggcaaaagttccacaaaacctttatgattgtacacgcggcacgtcggtgtcgctctattgcacatgctgcacttgaataattctttatcaaacataatgctcgtgtagcacttaaaacacacggcatgattacactctgacgttgttacaaaactggagttgtaatttttgatgtccgtaaaaaagcacgaacaaatgtggcaaaacacggccatatccacttgcggaagaggcacagcctcgtcctccgattcggcatcaactgcatgaaacattgtttcaaacctttggcgcggcgtctccaagtcctccatcacagtcaggtccggagagtggacaggagaatagttaggcagtggcgctgcagtttcttgtacttcgtgcaagtgctcgtgcagatgcacggcgcgctgatgcgcgcggttggcggcctccgtttcttgagaatccctttcttcttgaaaatccgcagtgttgaacggagcgttgccgtgcacggtgtactgggcgttgttgtgaacaaaccgcaaagtcaccggctcgctggtgtcgcctattacgtgccatgctcgcatgcgttcctcggcagggcgatcggcagctcggcgcgcttcaagaatgctgaagcgcggcgccggcgtgggcacggcgtcttccggcgagtaagaaaggcggcgaccgcgaagaccggaccggcggcggctgacgggggtgttggcgttaatttggcggctcatggcgagtgtttgatcaggctggtgctgttcaactgtgcttaccagttcggtgcggcctgtatttataggcgcgataaggcccgcgcccgtgcgtcgagtcacgtaggccgataaacacgccgtttgataaaattagattagataaacagcgcgcgccgagtcacgtaggcgcgcgcgcaacttttttgcagtgcaaaaatgtacattacgtggtagtgtatagagagcatattaaacagtgtagactattaaagtaaaatagtctacgaaacgaagactttgttctgtatatgggtccttgaaaataatgattatttttgcacttcaaaaaagttcataacaacacggaactaaatttttacagatgttttcgaaaaacgagtacctcagacatgcgtcagcgccgaccccgcttttaagtacagacgttccgaaaaacgaatgcctcagacatgcgtcatcgccgaccccgctttccgaacacagatgttttcgaaaaacgagtacctcagacatgcgtcagcgccgaccccgcttttgagtacagacgttctccaaaagcggggtcgggcggcgattctggtggtttcaagagacgcgtcctcgacgagtgtttttaaaaagcgtggcacctactctgaacatgcggctggcgctgaccccgattttcaagtacgagtgttattgaaaggagtgttatctttaaatagcactgcttgtaaacatgtcgatgataaacgttaaccaatgacgccttacgcggaatttattttaatcgtcggtgaccttcacgaggtcggcgcccggcgcaaataaacattgttatcaaccggagtagaaattagattagataaacatttgcacgtcacatgggtggaggggctgcattcgctgttggggcttatcaaaatgcttgctgtggaggggcgcgctgggtataagtacgggctgcgcgatcttgtaatcacagttcgttgagagcttctgagcactctgctattaggcagcgcgatcgcgtaaacacagtttattaaagttgtgaattactaactagtcaacatgtacagaagatataccccttactacaggcacgtcatacgtaacgacaacgagcgccaggccgttcaggaacggctgcttttaagttttaacgagaagccagtgactccgctgtcagctacttgcgccgtgtgttacgaaacgtacgtgatgcagtcggacaatatcgtcgagttcatgatgccctccacttgcacgcatatgttttgttacaagtgcgtgctagggttgtaccgcaacgccgaagtgcacgccgaaatgccgcgcgttggtatcggctgtccattgtgccaaaaaaccgtgaccgcttggcgatcgttctttcctaacgccgtggtgacttgcaagttcactaaaaagacgacggacgtgcctgtttgccagcaattttgtgacgcagtgggcattcttaacaagcgttacgccgccttaccaggtgacattccgaacaatgaagttgagctgcgtgagcagctaaaccgcgttcaggaggaaaaggcggcggagctgcagcgcatgaaggccgcgcatgacgctgcgtgggagtcgtcctgccggcaaattgcttcgctgcaaaaacgcgtcaccagccttgaaaccaaaaatgagaagttgcagcgtcaaaaccaagagtatgacgaagccatatgtgttaatcatttagaaaaaaaacgtttacaaagccaaaaagaagaaagggacggtgcttctgcgaaaacgattgcggacttgacccagaccgtggaacgtttgaaatccgagctggcctcaaaatcagcggtgaccgtcgagtttaatcggaacacagacactcctttgtaccagcgcttcaatgcacttttagactctacttttgagaacatgatgctcaaagaccgcatcataaatttacgaaaagaggtgtttggtgccgcatgtgtgccttgccgcgttgacatcaatattaattgtaatgataataatgttaataatgatgatgatgatgatttaatattgattgaagatcatcatgataccataaccattgacgattaatttgtaatgttaataaagtattaaatataaaagtatttgttattctcttgtttttgtataatataagttttaaaatggctgatgtaaataaaaataataatctaaacaataacctttgttttattgttttgcatcccgttaccaccacgccgacttccgacgaccctgacgagtgcttaaacataaaaactcaaacacaattagtactgaactcggcgaccaacgatgcgtgtgatgagcatcctccagagttgtgtttgttaattaaaaatgggtgttttactatttgtttgtggtcaatcaatctgcactctaggttaaacctggtcaggcaaaacacaaaatcgcgcgcctgcaagttgcgcacgtttttcagcaaggtaatgtcgttgtactgctggcggcgccgcatgctggacaagtcgagcacttcggccacgctgcgctcgaatgggtgcttgacaccggtaagcagcttgtaagttaccacgcccacggcgtaccagtcaaacgaacgcgcgtaattgtggcggcgaattttttccgggctaaagtactcgagcgtgccgtcgtgcacgcccggcgagtgctcgcgtttgcacaggccgtaatcgcaaaggtacacgcgatcgcgcgccccgaaatataagacgttctctagcttgacgtcgttgtgtatgtagccggtaattacgtgcaggtcgttaagcgcgtcacacagctgccgtactatattggccactagcgcgctatccagcgctccctgagtttgcatcgtttcaaacaagtccgggcacggcacgtaatccatcacaatagcccacgcggtgggcgaattgtagcaaaagtacatgttgacgaaactggggtgatccgccatcagatcgtgcacgtttatctcatcggcgctgaagttgtgcgcggaaattgttttgcgcaggtagagcttgctggtgggtcggtggtgcagcacgtccattttgccgaacctgccgttgacaactttgggcgcaataacggtgctgtcgttcacaaactgcgttagcgcttgtaaggttgcgtccatgatggaacgccagtaccagtccgtgcggtcttatttaattggcaaccagcacaataacatcgacgtcaattttttcttttcaagagtggtaggacccgaggcacacaacatcaagttgggcttggccgatcgaacagtgcgactgaacagaactaccgttttggacttgctcaagctggccgaaaacatttacgctgacacagcgtacatgcacgtggaccaagcagaggcgtcgcggcattttgtgacgctgacgcgcatgcgtcagcttttaattaacgtgcaagagcctaacgtcagacaatctctaaataatattctagcacgtattgaaaatttattgcgcttggacacggtgaatgacgtggagatgggggtgttcagcggcgatttttacgaagaatactccaaatttatgcaaacgcaccttcaaacgtacacgcttcctccacaacaactgcagccgcacacgcagcccgtaacacaacagtcgcagttgcatacgccaccgccaaaatcgcgaactgagacaccgccggaactatatgtgtataggccgtcaccaacgccaaaatcacagctacacacgtcgccacaaacgtacacgccgccgtcgtccccacaagcgcagatatacacgcagtcggatgcattattttctcaaccgcaccacaaatcgcctgagcctgtacgtacgttttctccaactctagaatcaccaattggtacatcgtctagacctacagacgaatttatatttgtggccgacccggataaaacgcacgctaaaaggcccgacatgcctagcaaaccgctcacacctttcaaacccccagacctaaaggtagtaaaacgtttaaaatcacgtcctgcttctattgctacaagtgcgtcgtcgagcatgcctccgccgttgctcgacaattcgattgatgctgcagcgccaactttgtcggcgggcatacctccgcctccgcctccgcctccgccgccgttgctcgacaattcgattgatgctgcagcgccaactttgtcggcgggcatacctccgcctccgcctccgcctccgccgccgttgctcgacaatccggttgataatttattgataaacgcaatggtttcagagcccaataaaaacgcaggtgacgtgcacagtgcgcttttagatgaaatcaaacgaggcaaacagctcaataaacccaaacccagacccgcagacaccgagcccaataaaaacgcaggtgacgcgcacagtgcgcttttagatgaaatcaaacgaggcataaagctcaataaacccaaacccagacccgcagacaccgccccggtagccgatttaggtagcaaaattaaacaagacaaaacaacggcaggacaaatgtctctactttccgacactattgacaagcgccgcattgctatggccggcaattccacggcgtcagatgtatccagcgagtctgcagataattgggactacgtggaagacgatagagccaacaagggtgagttgaaacacacggtgaacatgctaaacttcattagaagcacaaacgcgtataaaaaagaaaaagatttggaattgagcaacttgattcgatctgctgcctatttattgcaaaaaagaccacgaacggccgaaaacgtgaataaagccaaagtaagtttagatacatttaaaaaacgcgtcactgtagcggaaaatttacccaacgccgaacaaatgctggcgctgtacgccgcggacgcgccgcagtttttcacgcaaattgaaaatttgctcttggccgataaatacgttgaagccaatgcgtatttgcgcgcggtcgacgcgcccgatgaccaaaaagtgaacgagttattgacacgcgccgaccagttgtcaacgctaga

SEQ ID NO: 11 - DNA, 131995 bp, Orgyia pseudotsugata multinucleocapsid nuclear polyhedrosisvirus
  misc_feature (106614)..(106614): n is a, c, g, or t
  misc_feature (107152)..(107152): n is a, c, g, or t
gttgacgaccccgacgtgtgcctaaacgcacacgtccccacgcagttggtgctcaactcggcggcggcggcgaacgacaccaatgacgcgccgcccgatccgccgccggcccaatgcaccattcaaatatagtcgtgtcggctggccaaaaacgaatgttttgcaatctgcttgtagtcggtcgacctgcactcaaagttgaacctggtcaagcaaaacacaaagtcgcgcgccatcaaattgcgcacgtttttcagcgcggcggggtcgttgtattgctggcgtcgccgcatgctggccaggtccagcacctcgtccgcgctccgctcaaacggatgccggcccccggttaggagtttgtaggctagcacgccgacggcgtaccagtcgaatgaccgcgcgtagttgtggcggcgaattttttccgggctaaagtactcgagcgtgccgtcgtgcaccggcgagtgttcgcgcttgcacaggccgtagtcgcaaagatacacgcgatcccgcgccccaaagtataagacgttctccagcttgacgtcgttgtggatgtagccggtggcgttgtgcaagtcgttcaacgcgtcgcacaactgccgcactatattaaccaccagcgcgttgtcaagcgcgccctgcgtttgcagcgtctcaaacaggtccgggcacggcacgtagtccatcacaattgcccaagcggtgggcgagctgtagcaaaagtacatgtccacaaagctggggtggtcagacattaaatcgtgcacgttgatttcgtcggcgctaaagctgtgcgcggcaattgttttgcgcagaaacagcttgctggtggtggggcggtggtgcagcacgtccattttgccaaatcttccgttgaccactttgggcgcgagaacggcgcagtcggccacgaaccggcttaacgactgcagggccgcgtccatgatggagcgacagtatcaatccgttcggtcttatctaatcaacaaccagcacaacgccattgctgcgggcccgttcttgcagcgcgtggcggggcccgaggcgcacagcgttgggcgcaacgttggcgaccgcgcggtcaggctcaacaggcaagcggttttggatctactaaaactggccgaagacatttacgcggacacggcgtacatgcaagcggaccagccagaggcgtcgtcgcggcactttgccacgctgaaccgcatgcgcctgctcctgatcggcgtgcaggatcccgacgcccggcgcaatttaaacagtgttttggcgcgcattgaagcgctgttgcgcgtcgacgtggtgaacgatgcggaggttaacgtgctgagcggcgatttctacgaggagtattccaaatacatttcttaccaacaaacctttgcgcaaacgcccaccgcttctgcttcgcaacaaacacaaacctctcttccgcggccacaaacctctcttccgcggcaaacgcaggcctctcttccgcaacaaacgccctttgatcagcctgaaatggtctcgccgccgtcctttgtacacacaacgcccgctattttgccgcaaaccacgcaaccgccggcgaccgatacattttctcggccctctgacgagtttgtttatgtgcccggcaaagaacgcgctgtgcccgacacgcgatttaagcctcccgtgcctcctaaacccgagcatttaaaatcgcggccctcttctgtggccacaaatgctgcgggcgcgacaccggtcgcgccgccgccgccgccatttccgtcggcggatgtgaccacgagcatgccgccgccgccgccgccatttccgtcggcggatgtgaccacgagcatgccgccgccgccgccaatggtagatttggccacgagcatgccgccgccgccgccgccgccgccgccaatggtagatttggccacgagcatgccgccgccaattaacaacgccattaataatttattaatagacgcgatggtcgcagagacaaacaaaaacgcgggcgacaatcgcagcgcgttgcttgatcaaatcaaacaaggcaaaacgcttaaaaaaacccaacccgcagacggtgctccggcaaccgacccgcgcagtacgctgctcagcgaaattagacaaggcaaaactcttaaaaagctgcgtaaaatcgaagaccaaagttcaacgcagactttgctcaaagacgtagacacgaccgacaaaacaaaaacgattttgaaaaactttgtaaccaacatagacaggatttcaaagcaagaacaagaggaaaaggaccggctcgatacaattacaaaacgccggcccgccgtggagcatacggacggcaacagcacgggcaacaactcagatgattggagagacgactagtaaaataatttgcaaaatttaattgtttgtattcagtgtgtacggcaaatgatataatgaccatttaaactcaaactttgtttagctgcacgtaattgcgcgcgggtcggcgctttttcgtatcaattgtaacggccgtcatgcggccgcgtagttgtcgatttaatacgccgggccggtgaacaacggcgcgtcgggcgcaaactcttttaccttaaacacgagcgacacctcgatgagaatttcctcctcctcgctcgaatccgtgccaatgtacacgatgggcttataaaagttctcccagatgacgcggtttacgaacgattcaaacgagttggtgtattcggcgtgaatgttcatgatagggcagccgccgccttttttggccaggctgatgcggtactcgttgttcatgcccacgtacgacggctcgacaatcctaatcacctcgtggggcacgtagtcgcagtcccacctgagagcgtgttgcgccaagaatttgtagcagcggttggggcgcgtgggacgcatgttgacgacgagaaacacgtccattacttcttggtcgttgacgatggggaagctgtcttccacgaagcgcgtccaggtttcacgtaaaaactccttgccgctccagttgacgatgagcttcatcgtgtcgggcttgacgttgcgaatttctttaaacagggtcagtttttggtttttgccggggcccaagaaggggtcctcggcgaccatgtagtggtctagcgggtccaggtgcttttcatcctcttcgtgttctagaaggtgcttcttgcgcttggcgtttttgatgacggagcccaagtttttgtagtatttgttgtcgtacacgtaggtgcgaccaatggtcggccggtacgagtaatctggcatggttataggaaatttttttacaaaattgttacaataacaggaaattacttattaataaaaaacgaaacgccaatagtaactagtgttttattttttgttgtacataaattcgtaagcagcaaaacatatgctcaaacattaaacctttggcggagtgcgggtcccaagagcgctggtcgtcgcaccaaacgcaggacagctgcaaccggtgcctcttgtgaacggttgtcaagtgttcggggtattgcgacgccccattgtttttgcgcatttggcgcacgtcaccggcgccgtggcgcgtctcaaatacttgtcatacatttcgcgatactcgtaattctcaaacgactgtgctcaacctgcatcgcgttccgttttctaaagccgctggcgtgtgtgctgcgcgcttgcgcgccaaccaaagattttatcgtttttttaaacggtcctgcttcagcaaactgtcttgcttcagctgcaagcggtgaatgcggtccacaatttccttttcgcgcgcaatgtcgtccagttgggcccgactcagcgtcgaccaccggccgtcgtcggcgcacgccggcgcggccgcagcctccaacatgtgacgatccgccgcaatctccacgcgcttcagagccgccttttccgcgcatttctttttccttgccttgtcgtcggcccgcttgttcaaatgcgcgcccacaaaccgttccaggtcgtacaaacaatgcaggtccttctcgtcgtccaacgccgcgcccgtctgactgctccagcggtaaaacagctttaggatcttttgctcgctgttttgcgacgcgcccattcttcaacgccggaacaacctcaatggcgtgttaaaaattgcaaatgggatttaaacccttacacatgctcgcttgcggacacagctttgtgacctttttcattttggcgcaattggacggcttgtacacgtcttgagccttgatcaacaaatgggtcacctcacccacacacttggcgtccatcctgtaaaagtgcagcagcgcgccgatcaagcacgcggtcttgcattttgtgcacgtgatcacgttcgccaaatagcagttgaactcgaaccgttttctgtacatgttgccgcgtggcgcgctgctcaaatcggccatcgtcttgctcatgcacggcggcatgctgacgcgcgccgccagcactttggccaggctctgagcgccgtccgcgcatgctttcaggcacacgttgcgtctgctccgctgcggaaagcggcgcaccgccggctgcggttcctgcggtttgggggccgccagcaacgcgagcagccgcatgcccgacatgcgcacgaagaggccgcgctcaaacacggtgtacggcgaaagcgtcagcacacccacgaaatcgtgcgggtcaacgaggtacgtttcggacctttttagcccgtcgatgcccgccgcggggttccacacgcgctccatgttcacaccttatcgcagatcagactggaatgctggccgccgttggccgcggctttgactattacagccggcgccctgtcgccagcttccaaaaaccggttgcaatcaaacccggttgcggaacgcgtgcacagctcgtgcacgctgcggcgcaaactatttaactcgcgccgcagctgctcccggtcgtagtcggtcgtcaccgcggccgtgttcctcattgtggggcggttcattatatattattgggtaaagttgcattaaacaaaagtaacttactatgcccggcgcgcgctttgtcagattcagtctgcgccttacgcaggagtttaaggaaaacgtcgtcgcgcacgtcgaccacctaatggggctgcgcgcgctaatcgacggaaaggtcacgtccgcggacgtgcgccgcttcgggtttttgagccgcaacgtgctcgtcagcgcgtgcatggcggtcaacgtccaggtttacgcgcccgacgccacgatcgacatgcgccaccagcccacaatctactttcgcgtgtgccaaaactgccacgcgatggccgacgtgcccgcgcccgacgaccactccattgcgcgctacctgctcgccgagtgcggggcggtgctggtcattgaccacccgctggacgtgttcggtgagacggaggagggcgtcaacgagctgctcgaggtgcagcgcattaacgccggaggggatttatagcgcgctgttaattggttacaattagttgttgcacaattgtcaaatgcagaaaaaggatgagatcatgcagaaaaagctttgactcggaggaggacgcgcggcaattcgaggagcgaataaaacaattgttgcaaaactaacctttatttgtaactaacatttataaatacaactaactttatttgtaacatttataaatatacacacgttaaacaatttgcggttttaattcgtcattgacaaatctgtagctgcagcgggtggctaagaaccgaacaaagtggtcgttgatggcgacgcggcgcttgctttgcaccgcgttcagcgcgtcctggtacggcatttgccggctgcgcataaggtagtagactgccagcgccgccgatctggacgcgcccgcgtagcagtgcaccagcacgcgtttgccctcgccgatgcgccgaaccatgtagtcgtacagcgccggcatggcgttgggtagcgccgcgcaggtgggcgcggcctcgcagtacacgtgaatgtggtcgccgacgggcaggcccagcgcgtgccgaatgggggccacgtccgagtcgatcagcgaaatcacgctggcgattgcgtggttctcgataaagcgcagcatggcctcgttgtcgccgtaatagccgcccacaaacacgtgctcgtcaatttggctggcctcgtacatgcttgcgcgccaacaggtcttgcaggtaattggtcctttcgattttgtgcccgcgcgccgtttcaaagcgcgcaattgcgtccgtcggcgacacgcccagccgctccaccatgtagcgacacactaagtacccgctgcggttcagcccgtgcgtccaatgcaccgcaacaagcatggtggggcagcgccgaaaaaactcgtcgaccgtttcgataaactcggccacgatgtcgtcgtcgggcaccgcgcggcccggcacgcggatctttttgtacagcaagcccatcttcaccatttgcgcgccgtcgtagtagcgcgcggtgttcgtcaggtcgattacggcgcccaacgcggagtgccgcgccaacacgctggccgccgtccaccggtcctcgtcgctggtcacatactcgaacagttctgcgttcaggggcaccttgaaacagagcagccgcgtaccctcaatgaccgcgccgcacgcggtgtactcgtgccagcgatcgggaaacattgcgcgcgctcttacactcggtaaatgaacttggcgacgacggcgcacgccatttgtacaccatgccccgccacaattgcgctcgcttgtgcgcgtgtatataacggcccaccgtcgacttgtaagcatagtgtgcgcagcttcgccaacagcaacatgtctctatccagtaagcttcttgtgtacgcctactacggctcctacaatttgccgcacgaccgctacggcgagtcctaccatttgtacagaatagtgcacgagcacctgaccaacacgtacgtgagcaacgcgtcgtgcgtgcgccgcgacatcgccacggcgcgctgcttgaacagcgggcatctttgcttcgacgtggcgcgccagttgctggacgtaagcgaggtggccgcgcgcttgtcggcctggttccgctgcggcgacgccaccggcctgtgcgcagacatgcagcgcgcgctggccgacattgaccgccacgcgccgcttgccaggcgcgttggccgaagggccaacatctttgcgctggacgcgatcgccgacattccgagcgacgtaacaaacaacctgcagggcatcattggccggttcatgcactttccgcgctgcagcggcctggcgcgggtcgccgacgtgtttgatccggacatcagagccgacggttggtggtaccacaaattttgcgtgttgacgtacatgcaccttgtagcctgcggtgcagtgcccgccggatcggccacgcggttgcgcgacgcggtcgcaaaacatattgggcccaacgacgagggcaactgcgcgccggcgattgcggcggtgtacggccgattctgcgccattggacgggagcactttgcgcaccacaaaacggcctgcatgcacatcctgttccagtttatgcgcaacgacctgacgccggcggacgagcggcacccctgttttggcgtgatcaaggattttggccggcagtgcaaggacacgtacaccgacctgcgcacacacgccgacgcgctctacatccacggcacgacggaccgacaaaaaaacgcgttgtttgacctgttgtgctgcgtgaacgcgtcggacattgacgccgactgctacgactgtgttgtaaacaaattttatgcaacccaaaataaaaagtataaaatgtaaacgttgttttgttagttcacccaatcgtttgtgaagcgtggtcgcgcgcaacatgcagccgtattctttgcgagaacaagcgccgcggcagtttgtcaagctggaggctcttgtgctggaagacgcggtggcgctcaattcgaacggcccgttgcgtttgtagaagcaaacaaccattgcggtgcttagttgaccggcggctgattgcgcaactgctggttgcgcactgttggattatgagtctgtttgtgaaagccaagctgtaatggagcgcgccatcgtgtttttgttaatgtttgaacgcgcctacatgctacatctgaacattgttaggtcgtatactcaataaaatgtcaaaataaatgttatgttttatttaaaatagccttttttacaatgtcctttgccacgttcacggcgcagtcgacttcgatcacttttttgggcagccggcgaatcttgtgcccgccgttggcaaattcttccttgatgcaatgcacggccagcagcgggttgggtgcacgccctcgaacatcaacgtccatgccttcctcaaactccagcttgcgcttgcgaaagtgctcttcctgaccgcgcgcaaacgcgatctgcgtaacgccgcggtcttcaacgcgacccatgaacacggccaaatgcgggtgcttggtcacgtcgcgcggaaacaccacgccgggcgccgtccgtgtgggcgccgcgcactgcaacgcgttaagtttcgtgtccaatgtttgcaggcgctgctcaaattgctcgaaccgggcgccgacctcgagtttaaacgacttgtgcgcgctaataaacttgtcgctgttggtgttgagcgttttgacgtggttcagcaccgcctcaattttatccaacaaattgtcgcgatcgtggtccttgtttgctccaacggcgagcagtacctcgtttttgttggcaaacgaaaattgctgcaacaactggaccagcccgtgcttggtggcaaacaagctgcccagagaatcgggttgggcaggcggcgcgcccaacaccaactcattcagctggcgcacgtgttgccggtcaaagttgcagcgctgcaacaaatcgtggctaatcttcaatcctttgcaaaaatccacgacgctgcagcagcggccggccgtttcgtccaacacgtaccggaacttgaacacgaacgggtggcagcgaaacacgtcgcggcgcaccaaatccgagtgtgcacgttggtcgaccgcgtaccgtctgtaggcttgttcgtcaaattcggcgtttacttgctcgtcggcggcgttccaccagccaaacatccagctgaacatgctttgatgcgttgttgcaattgctgagtcaaacagcgcgagtagtcgccccccttataattgtaactaaacggcgcgcggatttgcttgtttgcgttgcaaaacacgtctcggtccacgtcgggccagtaacgcaataccaggtcctcgcgcgcgtccccgatatacatgtgcactgcgcgccggacgcaatcggcgaagctgcccggccggatgtcgcccgaaaccagctttgcgggttgcttgaacacgttgaaccagtgttcgcgtaaacttttgggcgcgtccattttaaacttgccgcaaaacttgagccacaaatggaacccgcggttaccgctgaacatgatgcgctgcacggcgtcttctttgccttcaaaaaacaacataaacgcggtggcgcccacgtttacctttagcataagttcggctttgtcggcgcaatctttgaaatcggcgtcgatcacccattcgcggccgccctcctccagcggcttcacgtgcacgtcactgatcgagtttttaacaatgtatgcaaacagctgcgcggcgctgtcgaaaaaattgtgcgcgtgcacccatcgtggccggtctgtcatgaacgccagccggcgactgtcgttgtacgcgatggcgtcccacatcatctgaacccgctccggggtgtacttgcacggcgccatcggcggctgctataaaaaacgggcgaggccgtaggggcacacactcttgattccccaaacaattgcaatggtttttctaattattgcgctcacgttactcgcgactggcgcgcgggccgcaagtattctagcggtgctgcccacgccggcttatagccaccacgtcgtgtacagggcgtacgtgcacgcgcttgtgaaaaactgccacaacgtgaccgtgatcaagccacagctgctcgactacgccgtgcaggatgaatgcggtcgtgtggagcaaatcgacgccgacatgtccgcgcaacaatacaagaagctggtggccagttcgggcgtgttccgcaagcgcggcgtggtggccgacgagaccaccgtcaccgccgacaactacatgggcctaatcgaaatgttcaaggaccagtttgacaacgccaatgtgcgtcgctttctctccactaaccgcacatttgacgccgtggtggtcgaggcctttgccgactacgcgctggtgtttgggcacctgtttcgccccgcgcccgtgattcaaattgcgccgggctacggcctggccgaaaactttgaacgccgccgcgccgtggcgcggcacccgctgcactacccaacatttggcgcagcagctttgacgcggcgcggcggcgcgctcagtgaatggcgcttgctgaacgagttcgagctgctggcgcggcggtccgacgaactgctaaaacaacaattcggaaaaagcacgcccaccatcaggcagctgcgcgacaacgtgcagctgctgctgcttaatttgcaccctgtgtacgacaacaaccggccggtgccgcccagcgtgcagtacttgggcggcggactgcacttggcgcaggcgctgccgcaacggctggacgccccgctcgaacgccgactcaacgagtctgtcgacggggcggtttacgtaagctttggctccggcatcgacaccaattccatccacgcagaatttctgcaaatgctgctcgacacgtttgccaacttgaacaactacaccgttttgtggaaggtggacgacgcggtggccgcgtcggtggcgctgccgcgcaacgtgttggcgcaaaagtggttcagccaaaccgcggtgttgcgccacaaaaacgtggtggcgtttgtgacgcaagcgggcctgcagtcaagcgacgaagcgctgcaggcgcgcgtgcccatggtgtgcctgcccatgatgggcgaccagtttcaccacgcgcgcaaactgcagcagtttggcgtggcgcgcgccctggacacggccgccgtctcggcgccgcagctgcaattggcaattcgcgaagtgattgccgacggggaggcgtaccgcgcgcgcatcgacaagttgcgcgccgttgtggagcacgacgccgcgccggacgagaaggccgtcaagtttaccgagcgcgtgatcaaatttaacaatgacgtcaattggccggcgcgctcgctcaaaacaacagctgccaacatggcgtactcggattactttgtgcgatttcctttgtaatttgatgaatcatttgtcgtgaatcactgtcaataaactgtaattacacataattgttgtgttatttgccccgccgtgcgactgcgcacttccagcctttataaacgctcacctttaaagcaggtcattattggagtacaggcagtcacaggcgtaacacgtcgccgaaatactttccaataccatggaaaccgcccaaccgccaatttcgtacgcgccgccgaagcggggagcggtgtgcgcctacgtgagaaccgtcgttaccactaccacagtttcggacagcggtggcaacaacgaggaccgattaacacagattgttgcgcagctgcaaaggacgcgactcaacttttccaaactgtcccagctgcaaagaaggcgggtgcgcaacatgcaaaagctgattcgaaaaaagaacagcgtcatcgccaacctcgcggcgcgcctgaccacccaaaaaaagacaaagcactttgcggttaccatccgcaaaaacgtgatccacaccacgagcgggtccgaacagtttgtgcggcagcgcgtgttagagttgtgcgcgaacggcggcgagcaggtgttttgcgcgcggcgcgccgactgtgcgcgcgaccggcggcgcgttgcagaagcactggcgacggcgttgggcgcgggtgtggtggcgagcgcggccaacaaacgctttgaaatcgaggacgaggaaaagttagtaagcgcaaagctcatagttcagcaggtgttgcacgatggagatcacagtgacacttgtgccgattaatttgcgcggcgcggaagagcccgagcgcaaccagcgctttcggctgaagccgctgtgcgccgccgccgaggtttgcctggccgtaaagtgccgatcgccgtttgccaaatttaaagtattaatctcagttactaattttgacaacaagcacttgcaggccaccgtgtgcagccggcacgccgccgtgtgcgtggtcaacgcgcccggccagcgagaggtcgtgtttgacggcttcgccaagcccgacgacgagggtgccacggtgccgctcgtcgtcgggccgctgtttgccgcgcgccaagcaggccgttgcgtgcgcgccgcggtggacgccattcagcggcagcagacggtgctgaaagtgtttattaacgaggcttatttacaaagcgcctggggcgcagtgcgggggttgttttttagtgataataaccacgaatctgatttaacaagtaatgtaggtaaatttattagcgtagacccaactgatgttggcgccaggggcgcaaattcctccaaatgggttcctgctattaattatgtgacgggtagacaattgttaactatattatttatttttaaatttatttgatgttaataaaactaactgtttatcacttggcgttttattaaaccttggccacaacaaaaaaatgtataaactccttccacttcatttcacagtctgtatgggggtagatggcgcggttggccacgtagtcgggcatctggcgcgcaaacgaatcggtcttgaaataagcgtacacaagcttgcgacaccctagcgccggcccgtggatgtgcagcgttcttctgcaaaaacttgtgacggtctcgtcgcggcggcgcgtgggctccgcgccgtggtggctattgatgcactcgtcgtacgcttcgcgcggcagctttgcaaaaagcgcgcaaataagcgctttgggtcgcgccaccctaaactcgggcttgtccgtaaatatgtctttcagcaagcacatgatttggtcgttaattacgctttgcagcggcgacacgaccacgcggtaggcgtcgccgaacacggcgagcgttctgacgcagcgttccattgtcaacgggcccttcatcgcccgtatgttgacaaaaaacacgttaaacacggcggcgccgcggtccacaatcactttttggtcgacgtattcgtcgacgccgttgagcgccttcagttccacttgcagcgcaaaccgcagcaggtcaaattctccgttgaagctggtgcgcaccgtttctacgcacggcaccaggcgcgcttgcacgggcccgttaaaacaaaacgccccgttttgaaaacatttcacgacaaacaagtcgtcctgcatgcgcacgctctgggccaatcgcgataagatttccaaattgtcttgcacgcacgcttgcagccgttgttgcaagcgcgccagctgcagccactcttgcgtggcgttgtagtaatcaaagtcgaggcatttcagcacgttgcgatcgtctccaatgtggcaggcggttgccgcgccgccgctcaacacaaacagcccacttttgtcggccactacggcctcaaaacaggctttgaaaaactttgcgcccgccttggcggcaatgcggttgcgcaggcggtcctccatgtccatggtggtaatgtaaggaagcgcgcccgaataaatttgactggccacgcgatccatggtggtgcaacatgcagtccacacgtctgacttggacaaatgcgcgcgcgcaacaggccattttggcgctcgctgcaacgggtcacggcgtctactgcgagcgggccgtcgcgttcgttatctcggccataacaaacaacagcctaagctggccaacgctgctcaacctgtttgacctggtggtggcggttgagcgaaacctgtttaagaaaagctgggcgctgaatgcgctcgtcaacttttgcgtcgccaacggcgacgggtttaccgtgcagcaccagttgctcaacaaaatattggggaatttaatagaaaaatactattaggtaaaatgttttggttttatttggtatagttacataacattaaaatctaaatacaaaataacaatgcgaataataatacaattaataatacaattaataatacaattaataatacaattaataatacaataataaatctatagataatactattattaaatactgacacgatacataaaagatcttttaaatactgacacaatacaaaatactgtacaacaacattaattattaaaattaaatttaagcactggtcggggggagcgtatgggcgccaccggcatgggcgggggtacgggaatcttcatctttggcttgggcaccctgtaaaccgatgtggggacgtcgtaatgtcccgcgcttattccgctgtcgggggaacttggcgggcacgccgcttgtgttgaaaaattaatcgggagacgttctgtgtctgccccgtctgcctgcaaaaaggaaaatagttgtggggcctgttcctggcgcgcctcgctgataatatccaacttctcatgttgctctcatgttcctcctcctctgcagtgtcatactctttttctgtctccattaacagtgtgttggtgatattccgcgccctgttgggtttgcgacgcgtttccttctgttgcacatacatgttccaacaatgcatcacgattgccaggagcgccagcatggtcagcgcgccctggttttgattgaacacggtgggctcgtcgtgcctgacctccattctgcaccccacacactttttcatgaaattgtcataatacacacaattgaggtcggtgcggatggcgttggcgtcgtgcacctcatactcctgcaccacaacgccgctccagcacaacgattggcggtcgtggtgtcttatcaaggcgtccagcacgggaacgtgtccgtttttgtgtatctgtggctgaaacaccacaaacagcaaccagcagctgcccgccatcaggtgggccagcgcaactacagtcttcatgtaaaaattgctgcgcatctccaaacccttgtagcacagcagcatcttgtacatggcccacgtgatggtggccagcacgtacggccccagcaaaaacgcggccaaatgtgacaagttgatgattgagtgggcggagtcttcgagctccagcagaaacgcgtatctagcagttacggtggccattaacgcgaacacgaacgcgaacgagcaaagcccgaacaacgccgcgtgcagcactagctgcaaaaaataattaacttgcactagcatgctgagtactaagtattagcagcatgtatcaaatactgattgtgcttttcctgtttgcgctgctttatatagtggtttggcccttttatcaggccttttatcacataaaccacgcccagcaagattacaacatgaccttgactgataggatggactatatagaggcggtcatgcggcgtcgccagtatgttcccatggaggcgcttcccgtggtgcgtttcgacaccaacctgggcaccttggcgggagaaaccctaagatgcatgtccgtgcccttgtacgttagcgaaatagacctgcccatgtttgactgcggcgaggtgtgcgaggaccccaacgcggtctacttttttgtgggggagggcgacacgtatgtggtcaacgggcacaagctggcggtgggcgggtactgcaccaccaacagcgtgccgcgagactgcaaccgcgagaccagcgtggtgctcatgagcctcaaccagtggacgtgcattgccgaagacccgcgctactttgccggcaccggcaacatgacccagctggcggggcgccagcactttgaccgcatcctgcccggccagagcggccgcaacgtgttgtttgaccggctgctgggccgcgaggtcaacgtcgccaccaacacgtttcgacgcagctgggacgaattgctcgaggacggctcgcggcggtttgaaatgcgctgcaacgcgcgagataacaacaacaacctcatgtttgtaaacccgcgcaaccccctggaatgcctgcccaacgtgtgcaccgacgtgaattatgtgcactccaccgtgcggcccgtgtttgagtcgggcgagtgtgactgcggcgacgaggccgtcacgcgcgtgcgtcacgtggtgcccggcgaccgcacgtccatgtgcgccagcattgtggacgggttcgacaccaacacggcgtcccacaggtttcgcgtggaatgcgtgaacacgcacaccccaattgaccgcttctccagcgacaagctgctgtgtcccagcgacacgtttgacagcaacacggacgcggcgtttgcctttgaggtgcccggctcgtacccgttgtctggaaacggcctggacgagcccacacaccgggtttttctggacacgaggtcgcgcgtgcaatacaatgacgtgcgcggcgcgctaacatgattttatcgccagggccatttaccatcttatcacaacaaggcttattttatcaaattatcttatcgaacaggatgttgttttatctaaatagaacagctatctaatctaaatgaatcaggcggtgcgctatctaacacagattgcttatcgcgattgtaagttgtttatttgcgccgttaattacagggtgcgtcaccgggtagtatataaagcgagcgcgttggtctgcaaactcagttgagctatagcaatcggcatggcttgtgtgctagcatgcgtagccgtgttaatcggcgccgccagcgcgaccgcttctatcgactttacgcccatcgacgacggcgcgggcctcgtgtttgagcgcatcggcgcgttgcgccacgtgaccaaccagcgctttttgtttgtgcagaccatcgactactacccgctgctgcaggagcttgcgaagatttccaagtttgtgcgggagccgcgcaacaacgcgagcagctgcccgctggtgaagctggtcaggccgggcaagccgcgcgccactggcggccgcataagcaagcatttggcgtcgttgacccagatcaacaaggagtttgtgagttacacactgaactcggccgacccccaaaacaacgaggtgttcacagacgtcctcgaggttgattatgaggacacgcggcaacaagacgccgcgtttgccgacgcgcacaatccgccgcactggagcgtcgtgagcgccgccgatgttaaagagctgctggcggttgcgccgccgcgcgaccgcgtcagagtgctgccgcacatctctaccgccaacgtggcggataaatatctgaagtacgaggcgtgcataaacgaagagcgcagtgctgacaacgagtgcctgtacctaaccgagatgcacggtgttatggccagcaagttggcggacgccgcgtcgtttgctaacaccctagaccgcctgatcaagcaaacgcggcgcaacaagcttaacatgaccaacaacgtgattgacgacgaactacttttgcgcgagatgcgccagctgagcaagttgctggccggacacggactgggctgggttgtggactttgagcgcgaactaaacgcgcagtttgacttgtcgcaggcgtacaagctgcatttgtacgccagccaaaacaccgtggtgctgtgcgtcgccatgccgcttgtggacacggcggcgttgcagtacagcttgtacaaggtggcgacggtgccgttttgtaggggcaccatgtgcctcatgatggtgccggccgccgattacattgcggtgacggacacgcgaaacttttacacccaggtgccggccgactttcaaacgcaatgcaaggcgtttgccggctatgacgagtttttgtgcccggccagccagcgcgtccccactctggattcgggcgagtgtgagatcgaaatgttcatggggcgctacgcgcgcgacattgacgtgcaatgcgacatgcgcgtggcggacaaccggccaagccaggtgctattgggccccttggtaaattgtcgcaagtgggtgtattcgttttcaagcaacgccactgtgagttactggtgcggcgcgcgcgacgccgccactgtggcggtgccggcgggcgtaggcgtggtggttgcccaatcgccgctgacctgttcggtgcgcgtcaacaaagacgcgctcttgtttaccgtcgacacgcggtcgcacaaggccgcttcgcgcgcttattggccccgccgccgctttaactacaatgactacgtgaacacctcgctgttgctccagaccacaacctcgtttgctgacaccgtcaccgatttgagcgcgcaacaactgaaaacgttgcgctccaggtttcacattcgcgactacgcaacgccgcggcacaccttttttgcgccgcgccgcagcgacgcagccgcgcccgacccgccgcacgaaaagcccaccatgctggtgtacgtgctgctgggcgtgggtgtcttgagcgcgctttgcgtcgttggcgcctattgcgcgttcaggcggtattgcaagcaaaggcgcagctcggttgttgtgtcgtttaaaaacgacgacagccaacccatggttgccatatcaaacggcgcgcgcgccggcgtgcacattaacgtgccgcacaacaacagcgcgcccaaatatgaaaaggcgttcttgtttccaatggaaatcaaacgcaccaacaacaaacttgcatagttattattattgatttgtattttctattagctatgaaacaaccttgtatcctttgtattagctattatactaacttgtactttctgggtaaataaataaactaatgttgtacatgaacttgttttatttacgcaatcacaccaacaaacttgcatactaatctaaaaacgttatatatagcgtgttttatccacggcagtgcgcgcaggccgcaacgcgctttgcacgtgcgcggcgtttttaagtgcggtgtgcaaaatgcgcaactcagcaggcttgtttatgatcatggaacccgacagggccgtgttgctgtgcgcgcgacgcgcctaccacggcggcgccgtcagcgacacgtttttagaaaagatctccattccgcgcgggcaccgcgattgcacggacgcaaaaatctacgaaaccgccgtgcgcgagtttgtggaagagacgggccggttcttccacagcgcgtacatttacaagtttccgttcacgctgcattggacggacgagggggtgacctacaagtactcaatttacgtgggcgtggtgcgcggagcgttggccgacgtaaagtttaaacccaacacgtacaccgtcaagttgttgccgggcgcaaacaacgactaccgcattgtgctgcggccgcgccgctttaactgcgaaatttcgcgcagcctgaccatcgtgccgctaaaccagtactttgactacatgacaagcaagcaactcaacacgtacgcgtctagcaactacggcgagttttttgactttgtgcgccaagttaagcgcctatttgacaacaagcagttgcacgactttttccacgcctcgctgcagcgcgtagaccccaacgatgccctggcgtgcccaggaccacagcgttgactgcctgacccgaagcgaggtgtacgcgctgtgggccgaggccgtaaacacgttgaagcgcaatctgcaggtcaaaaacgtgtctgcgcacctgctggaagacgacgcggccgacgtgaaagattatataagagcgaatttgagccgctttacagtaatcaccggcaagtgttcgaggcgaacggtgtgccaccaccacagaagagttcaaaggacccttgagcccagacaagatttagtaaacgagtacgcttgttccgtgacggacgtgtatcgctcgccaaaatggtcaatttgcccgacaacgtgcacgaggagtcgttcgccaacaacaacgcctcgctgattagcagattggagaacagcgcgtttaacaaaagcaactttgagtacctcaagacgtgcattaattttttcgagaaaaaaagcgtcaactacacggttgttgcgttgccttgttcgggcgacgagcgcaaagcctcaaagcggcctaaacgggtcaacaaccacaacatgtacatcctgttcaacagcttctacaccaagattcgcaggccggaatggcccaacagccccaccatgtgggacacggtaaaggcgcacaaggaactatcggattttgtgcgcgtgtttgaccatacgcagaaattgggcaagagcatcaccagccgctccgcgtccagcagctctttcacggaaacgaacggtaagcgacggcggtcggtgatcaccaacgtggccgaggtgcaggaaaattgcgaccagcgcgacaagctatactctgaattttacagcctgctcaatgaaacgttcaaaaccggagtggcgcccgccaccagcaacatttacgacagcgttatcacgcgcgaattgctgaccaagaacatggagctgttcaaaaacattgccctcaagttgccttctcccagctacgtgcccacgcccgtgagcaacaaaaaacggcgcgcgccgcccagcgcgcccaagaaaatcgctaagcagcgccgtgacaccaagccgccgccaacgtacgttagcgacaacacgcaagacaccaacatgtcagaataaactaaataaaacaattttaatttatactttgttttttattttaaaactggaaattgtatttgttaaacaagctgaaaatgattgtcaactgccaaaacgcaacagcgtagattaaataaactgcaaaaggctgagacagcgccgtttccctttcctgagcccgtttccccctcgcagcctgagcaccatatgcaaagtggactccttttgaatgttatagtccgccagggtttgggcgtcctccagctgtttgcccgcataaataagtctctgctggtccacgggcacgccttccttgtcggcgatcttttgtttcacctggccgacagtatcaccgggctccgtttccacggtaatggtcttgccggttaacgttttgacaaatatttgcattttgaatctcttataaatggcggcgctggtcaagccaatgctcccgctcgcaacgtttggcggccaacaaaacgggtgcttgcaacaccagttggcgaagctggtccaggcgcgcgcgcggcgcggctacgagcacgacattggtcagctggcagaaaagctcaagaagcgccaggtggcccgcggccacctgggcgacgtgcttgaacagatgggccgccaaagcgaattgttgccagagctggtcaaaaacgacgaggagttccgcatcgtgcagcaacgcgacttgggacacaacaccatagagtacctcaacttgctgcagcacgacaaactgtttagctgcaggctgtgctacacgcacgcccattggctgtggtgcgaatttcacaaaacgcacgcttaccgcgggccgcgcgatattagcgtggacgcgtacgtggaccacttgaacagcgacatgggtgtggtggctctagtcgaagaatattaccactggctgtcgtcttgcaacgacaaggcggaggccaagcgcgcactcaaaacgttggccaacgttgaatcgcttggcgatcttttggacagctacaattattcgagcgtagacgcggacacgtcgtcctacgagttaatggatttcgagtagtcatttgctttacaatgttttaatattgaaccttttatatgacgtcattaatattgcgttatagtttatacgtcattactttgaccttgctataacatgagtcatcactttgaccttgcactaacgtgagtcatcactttgaccttgctcaacacgtgagtcatcactttgaccttgctctaacatgagtcatcactttgaccttgctctaacatgagtcatcactttgaccttgctctaacatgagtcatcactttgaccttgctctaacatgagtcatcactttgaccttgccttaacatgtgagtcattactttgaccttgccttaacatgtgagtcattactttgaccttgctgaacataaatattgctttgactttactttaacatttaaatcatttttaagcttttaatacgtgagtcatcactttgaccttgctataacatgagtcatcactttgaccttgctataacatgagtcatcactttgaccttgctataacatgagtcatcactttgaccttgctataacatgagtcatcaatttgaccttgctataacatgagtcatcactttgaccttgctctagcatgagtcattatctctaacacgggtcatcactttgaccttgctctagcatgagttattatttaatcttgttttaaagatgagtcatttaaaaatgtattatttcacactattgcatcatattttattatcagtgaccttggacctaaacgcccgatacactatctaagtatgtatccagtttataaacaggataagattacaatgcggactattgtgtgcaaagcgtgcgtcagcaagataagatagcaatgcgtcaactgctggtataaaaggcgcgcgttcgctgcacaaactcaaaacgcatcatgcatcggctcgccctagtcgtcgccactgtggcctacttgtgcgccggccacgcaccgctccagcacatcaccggcacacagcggctggtgcaggttttaatccacaaccggtatctggccgtgcggtccgacggcaccgtcggcggcacgacgtacgcgtccagcctggacaccgtgctgcagcgcatcgctatcgcacacggccgcatcctgctgcgcaacgccgtgtcttgcatgtacgtgtgtttggaccggtgcggcgccatgtacgcctccgccgcgctttccagcgactgcatcctgaacgaggtcatgctggaaaacaactacgatgtcatgtttaagatctacaacggtaagaaaacctatgtagccctggacaacaccggcaacccgcgccgcgtgcagctgccccgccaaaggccgctgcgcatgatgaacgtgtacacgttcatcatgcgcataccgctgaactacattagcgtttcgcagtgcgctaagcccaacaaggtaatcaggcaccgcaagttgccacttgttgtccaaacaacattaaatactatcagtatttatataattacgcacgtaaccatgttatttgaccatgttgattaaacactattgttaataatatgatacattattgtaaccatgttaattgactatatttgtaataaattgtgtattgcgagctcatcatttgttttatttgtcatcgcccttgtatttgcttgcaaacagccctgtcacactcgacaatcccgacaattgcgtgtacaagtttgcgttgaccgtgttgggccacgtcgggcgctcatttaacgtttgtaacattgcgtgtaaccccgtttgtgaataaatgttttataaaaattgtgtttaatttgcgcacaccccaatgatgccgcagcccagccggccgccagaattgcccgtggtcttgctgagcgggtgctcgccgaggcccaggtcatcgcggtccgtgtgcacgaccaggctgcggcccaatatactcaacggcccaaacagggttatcacgttgtcgctcatgtgtatggccgtgagtgcggtgcagcccgcagagcgcacgttgcccaggtcgccgacgtgtcgctccgcggcgtcgggcgcgccgtgtctctggcgggtggggttaaagtgctcgccagcggacgtgcagccgttgctggtgtcgccgaattcgtgcacgtgaaaaccgtgcagcccgcgaggcaagttgagtaggtagccggtgatgctcaccggctcgtcgggcgcgccttgtttaaaatagatccggccgctggcctcgcccgcgacaatgcagattgctttcatgttgccgacttacttaacgcgcgttaccggcgtctggttcgttttgggcggcggcgttgagttgcggcctgtaaaaattactattgattggttggcgcaaaggcgaacctaatcattaagaaaaattactaaatcatgaaattttcaacaatattgctacttgtttgcccaactgtggcgctgagcgcgcagtatgcgttggcatgcacagaaacgggcagaaattgccaatatagctacgaatgctgcagcggagcatgctccgccgcgtttggattctgtttgcatcgataactcaatctaacaaacgcttgttttactggatcaattgtatttgaaaacggggtcgccgttgctgacgcatcgccaatgatgtcggtttaccagaacaatctcacccacaaagcagggcggcgttgacgcacggctaaaataactcacgcatttcaaaatcgtttgtgcgcgcaaagcaagatcggcgcacgcgggtataaaataaaaaaattatattattttcatacatttagctgcaaacattcaaagagcgacgatgaagagttttatttgcggaactgcctgtttgttcaagtcaacaataattttgcgattaaaatcgcaaggatacaaagcaaaagtgggcgactacaaagaggcctgtgataaatatgcgtttttgaaaaacaaggcgtgcgatccggtcctgaccaccatttacaacgcatacaccgttttaaacgaagaagagggcgctgtgcatgacaggtgcgtgattgacgccatagtgtacgattgcctaataaaaaacatgccgatcgacgagttttgtgcgtacattgaaaagtttaaaatgttaaacgaaaaatggctaacttcgaactattttatttttctcgtcgccggaaacgcggcgcaaacgcttgacagaatgctcaaacgaaacaacggcatcgacgaaatgaccattgagtatgttgagaaacaaaacacgtactttgcgctggccgcccgcctgctcaaaaaggaactggtgaccattttcgagtttaacgacatggaagttgtggtgaacaaaattgccgcaaaccacggtttgcgaatggacacgcaagctacgctagtgtctggcaaaatcaagcccaactacccgcaggacgccggcattgacatgtacaccgccgtcgacaccgttttgccgccaaaccagataacaaaagtgaagctgcacaaccgtgtgttgattgaagacgggcactacgggcgactggtcgcgcgctcgtcgacccagtttatcgtgatcgagggcatcatcgacgcgggctacaccggcgagctgtttttcaaagccgtcaacgttggcccggcgccgattgcgctcacaaaggactgcgcatacgtgcagctcataataacggcgttttccaaaaactaccggcttgtcgacgagcactgcattgcgtctaaaaagaccaggcgcggcgacaaagggtttgggtcaacttcgtaaaacaagagtgttaattttaagctttattggattacacacacacacgttttatatattatacaaataataaatgtgttaaattactcgattgttttactagactattgcgtgcaagcgtcgcaatttgacaaatccaaatatttttgtttgttggtaaacatcaaatagtaaatggccgttttcaactttgcgtcaaatgtgcagcgaagcacacgcaacacgtcttcgtatgtggccttgcagctgacgataacagattgtgactggtcgacgaaaggcgcggttttctcatacacctccacctgcttttttatactgacaaacctgttgacactgtcgccgtcttgacgacgcaacagaaaaaatggggtttcggcaaagcggccaatgcccgagtttttcgtggtggccgccgcgcccgccatcgggtactgcaccgactcggtcacgtttgtgagcagactcgtggtggccgtcggcgcctgggcggtcagcatgctgttggccatacccttcatcatgtgatgtcgaacgctgtcccattgcagcgcgggcgtcacgtttctcaaatcaaactgtagcaatccgcgcgaaaactcgcttttggcaaagttacaacagatgacgccatacgctctgctgtacacgatgcttgaaagggcacagcccatgtacatgtactcggcgaccagggccgcgtaccggggcatggcggcgtacgcctcgtccttgccgcacatgatgtagacggcgtcaaacacgcccgtgggcgtcacgccaatttcgcgacgagccgtgtcgccaagcagtgtgtttagggcaaaggtggccatgtacgcggccgcaaaacagtgcgcaaacaactcgttgtcgccaaacgccggcatgcaatcgagcatgccgtgtgtcgcgaggtcgtttttgatttcgcgcaaaacggcctcgcggtcgtagttttcgcaataggcggccgcgttgaccgtcaacagtgtgcacattgagctggcgcttgagtcggcgtgctggcagatttccgtgcacagattgagcgtttgcacggcgcccagttgcttctggttgttgtactcgttcacgcggtctctccacaccacgtagggaaacccgttctctgtgatgcacatgatgacttcgcccaacacgcgccgcgcgttcattttttttaaataaagttttgccttcaccatgcgccagtacaggttctcgtactcttcgccgtagcactcgttgagcgacgcgccgtcgagggtggtgtgtccgtcaaacaagtaccacgtggcgttttcgtcgcgctgctgcatcttgataaacaagtctggaatcatcaggccataaaatatgttgggcgttacgcgcgcgttctgctggcgcagggtcaggcatatcaacgcgttgatgttgtgcagcgacaaaaacaaggccgttctcgatttgcgctcggccacgttgaggttgttgccgccgtcaatgtactggcagatttccacgaaattgttcttgagctcgccggcgatcgcggacccttgatatctgagattgtcggcgccgacgcccacgcccgtcccgttcacgcacattgccacagccctgtttagctcgtccagcttggtcgccgctgcgtagctgcgactaagcaccgtcaggtggcacgcgctaggatcggccttgtcggcgcacacggccgacgagggtatcaaagcgacgctttcgagcagcgacttgaatagtctggttttagttgggtggtcgccggccatcttgtttgccatgcgcgtgcaaaagccggacggcgtttcgccggctcgcatcatgcggctcaccagcacgttgcgcccgctggtttgtagattgtcgatgcgatgcatggcgacgtattcattaaactttaccaacaatgattatttatactgtcgctggagtggggtgcgcgacgctttaggcgctactgctacacgacgtcgccatttttgtaaaacaatagtacaattattgcgtgtttgcccccgacttggtgcgcgactggtaaacatcatatataatacgagagtgcaaactgcgttcgcataggcagctatgcagtgcgccatggaacgtgtgaaccaattgtttgacgcggtgttcaaaagtcaagttgtcgccatcgcgccgccgtttgagccgcacaacgaggcgacgggcaacgcgttgcaaatatggccgcccaaatacgggctgtcgtatgctttttacaaggaccatcaagccaactattggtctgcggaggagcacgacccgttggacgacattaacgggtttgtgaaattgccgagggaatggcaaaacgcggtattgcggtcgttcgccgtgctggccatcggcgacgacgccgttatgaagttcatcgatgaaagcggcctaaagtgggaagagagcaccgagtggctttttaaggaccaaggcgcgcgcgagaccgttcacaaaatagtgtacaacaaaatgctgcaactggccaactattcgacggactacgtgatgagctcgtttaccagcgacgattttgtttcgtacatgttgggcggcgaggcgttggagttttattcggaccaccgcaaggcgtgttttttgatcaaaatgatattttgcgaacgctatctgttcgcggtgccgtttctgatcatcaacatactgggcgagacgaacgccattaacacgtgcgtaaagattaacatgcaggtaatgaaagacgagcacgtgcattatttacatgcggtggccctgttaaacgacataaaggaaagcgccaacacaacggctataaacgagctgttttgccacattggcgaccagtttgtcaaaattgttgagccaatggtcgcgaaaatcgggctagatttaaccgagaagcaactcgcggggctgctggaccacgcacggtttactttgcgcgaaatttacaacgacaaccaggtgcccccgcccgacagcgtcacaccgtacacgaaaacgccgttttcggtgtttgacaagaacagcggcgtggacaagtttaatgtgatggaaagcaactccaccgtttacaaggcggtacgcggggcttacgtgcccaactggaacgcgaatctgaagaaaaggaggaagacatagaaacttcatttgtttgtaaacgcaaacgcatttattaatcgatattacaagtttagtgacgctattaaacaccttgaacaaatttgtgttttattgttacacttggtacatgcgcaccgctttgtctaactgaccgcggcaaacggggcacgtggtcacgcccgcagcgcacttgccgcacgccaccacgtgcccgcagggcacaaagcacacggtcttttcggcgccgaggcaaatcttgcacagccggtcatccgccacctccgcttcaacggccggccgctcaatgtgcggttcgttgtccgcgtcgcgaaccacacacgcctcagtcatcacccgctgcacaaagtcgcggcccttgacgagcagcacgtactcgcagcggtcgtaccagcgggcgtgttgctgccacggcgcgtcgtcgggttcccaatccttcagaccgccgtcgcagcaaaagcaccgcgtcttgtcgccctggccagtgtaaaagaatccggcctcggccaactcttcgggccgctgtttcaacccgcggggccactccgcaaaggtgcgcaaacgcgcggcttccgtggcatactgcgggtgcgcggccgccgaccgcgccggcggggcgcggtcgtgtggcgtgtcgtgcgcgttgttgcgcacaaacggacactgcggcgcccaccgcttgtggtccgtttccgggtcgtcgccccttacccaattcgtaatctctaccttgcaaaacgcgcagcgcacctcgtcgccgcggcccaagtagtagaacccgctggcggccatgcggctcggctccaaaaactggacgggccaattggtgtacgtgccgagacgcgcggctttgtttttcatgtctgcgccttcttgcggcgcgccaattgctcgggagctcattctgcaacgcgcgcgagcgctcacccgcggcttctgacaacacgaagcttgtcgcgtcgaatataagcaattcgctatcttgataatttgtaatctaaaatgataacgcttattgctcgtgatgcgcgagaaccggaactgcagatactaatcattggcatgttggccagcctgccgacactgacgctgttactgtgctcgccccaaatgatcgtgcgggactgtgcgggcgctggcggcgcatgggtcaacggcacgctgcagtccaccgccgccgcgcacgccgcaatgcacaacgcctgcgtcgcgttcgccaccggcgccttttctctgggcctgctgctggacacgttgacaaggggaccgcccaggcagccgaaggcgacggcgctgtttgcgtttttgttttgcaacaagctcgctctagtcgcggccgttattaggacgtgcgccggatcgaccgtaaacgccggccaattgcttgccggccgtttgcacgtcgccgaaatggacgattctttgttgctgtgcgcgctgtacgccgtgacggtgctgagcataatacacgttgcccaatggctctttttcgattggaaaacgctgtttgaaagccgtgatttggcgccgttcgccgcgacggccgttgtggcgaccactttgtacgtggtcgcgttgacgctggccaggtcgacagtcccggccaacgggttgcagatgtttcgcaacgcgtccgtggccgcgtgcaggttaaacgacggtggttggtttacaatggcattgccgtaattaaacaataaaaattaaaacaacagttttttatttgtcaaatttcacaagtctcgtcgtaaaactcgtgcagcaaagcgtccaacgcgcagctggcgcgcgttgcgcgcgtttgcaacttgtaaaagaactcggcgtccagtttggcgacaaagcacgccacgtgcacgacgtcagtttttttgcagtattgtttcgtcgcgccggtttttgtgctccatgcgcagcatgcccacgaattttacaccgccgcctttaaactgcgcgcaaccaaagccgtcgacaaacggcaagttgggcgccggcacgtaattgaccagcgccacgcgcacggccacgtggtcgaaatcgttttcgagcagcgtcaaggtaactggaattggcacgtgcacgctgtcgctgtatagctccgcccacgccaaacacaattttttaaacacctgcggttcaaagcaagtttgcgcggcggcaaacaggttgttgcgcaaaaccgccgcaaacgccgcggcctgcagcgcgggcgcttgcttaagaggcataaacgggcccgttttgcgcgttttgcagtataggtcgtttggccgcacaggtctcgccatggcgcccacgcgcgcgctgcgcctcgcgctcaaaaagcaagattacgcgcgcgcggccgacttggcaatcgaatcgcgcgccaaccgcctgtttctgcttgattaccacgacccggatttttgggcgtacgtgtcgcgcaattgctacaaccgcgacaagtttttgtcggcgtttggtgacaaaatcgactggaacgaggtttcggcgagcccgctcaccacagctacggccagaacgtttgccgcgaaactaaactgggcgcgagtgtcgcgccagcccttcttgagacagcagtttatctacgagtttggcgatcgcctggacatgcaagttgtaagcgccacatacaacaacctgtcgctggcggtgcaacaaaaatttgccgccgcgctgaactgggatcgcgtggtactgagccactacatgttgccggaatggttcgagcccccaatatgcgacttcatcaactttgacgccgtggccaaacacaagcacctcgacaaatcatacatcaacgcgccccattgtattaacaaaataaaccttggcgtgtatatgcgcaatataaacaagatcagcgacgcgctcattgtgtattgtttgcgcgaaggtcgcgtgcacgagttaagggtggtgtccggcgccgtgccgtgggcggaccacatgcgcgtgtttgacgagtaccccgggctggccaacacgcttcgtctggactgggccagcgtgccggcgtggaccgccgcttgcgcgccgccggcgcattactttcggcgaagttggcccgcggcgtttgagcgcgagtttgtcaattcaacgtactgggacaagttcatcgagtacgcgtccggcacgacgaacgcggcaagcgccgcgtttgcgctgtttttgtttgacaactttaaatcgcgcgtggactggcgccggttgcaagttggcgaccgttttgtaaacttggccgcgctgcaccgcgcgcgcggcccgctcgttgcgctcgaggctgccggcgacgacgaacgcgtgtggcgcgcgtacggccggtttgtgagcggcggcgacgcagcgcactgcgaactgctgatacccataaacatgagcgtgcgcgacgcgtaccgcaaaatggcgctcgtgcaggcttgcgcgtcacagcacgagcacgacaaggcgcgcacttgcgagcgccgcatagcgctcaacggcggcgaagacgcgctgctcaactggaacttgctctccgccacgcagcaagtgtgccccttcaacttgcgccacttgcagaacgccaacgcgcagacataccggcgcgacaacccgcactatgtgcaagacgtgtatgagaaaatgattgccgcccaaatgaatattaatgagtttttgtgagataaaagcgccgagatttactccagatgcacagatttggcgatgctttcttcaaagggcggcgacgcaaaagttgtgggcgacggcgcaaagtctctggccaatcagctggaccaaatcaacaaaattaaacgaaaggcaaccattgaaagtcaacattttgaaaaaatttacaaattgaccaaaaatcccaacgagctgcaagatttacacaaacgggttatggactcgagagtgcaatttctaaactttggggtgcagaacttttaataaaaccatttaattacaacaacgttttatttcacaaccaaacttttcaaacgcgtatacaccggcgtgatttctccgtcctcccggtcgtagatttctccgtcctcccggtcgtagatttctccgtcctcccggtcgtacccgtattccttagcgtagtcctcgagcgcgtcctcgcgcggcgtgggcgggcgccgcgccggcaagctcggcgaacggcgccgcttgcgagcgtggcaccaaaacctggtgccgtccggccaaaagtagcgttcgctgcagcgctgcaaacggctgaacacgcgcgcgtcgcgcacgcgcaaccggcgccgcgagctacggcgccaatcgattcccgaaacggcgcccgcgcacattagcgccaccaactcgcgggaaaaccgcttgctgtacccctgcccgttgtattgcagctccatcatgtgacgaatatttttataaaatcggccacgtcttgccggcacgtcgggcacttgccgtctaacgcaaagtagcactgcatgcacacacaaaaatggcggcagggcaacagcacggcgtcgcgctgccgctcgaggcacaccttacattccagcgcctcgctgccggcaaacgcgggcgcgggctcgccgggcgccgtttcggcgcggcgctccgagttgcaaaagccgtcgcccttgacgcacaccacaaagtagcactgcgggttggcgagcgcgtggcgttgccaagggtcgtcgcccggcagccaatcacgcacgcggcagtcgcaaaagaagcaggccgtctcgtcgcccagcatggtgtggaacattcccgcttccgcaatgtcgtgcgtgagcgcgttcagcgcggccggccagtggtcgaaagtggcgcgccgcgcgctggggtgcgccaaccgattgtacacgcagcgcggcttgccgggcgaaaccaccacggcgtcggtgcttatgtcttcggcaaactgctcgttttgcgcaattttgttggcgtacacgcagtatggagacagcgtcgcgtgcacaaactcgacgacgtcgttttcgcgccagtttttgataacgacaccacaatattcgcacacgaccgcgtcgtccacgtgcgtgtaccgaaacccgttgacgatgaggctgttgacaaacgcgtcgttgtcgatggggtagtcctcaaacgagttgtggcgctcgatcagcatgccgaacacgcgttcggcgctcgtttcgtggtcgcacacgttgatcacgtacagtggagcgctcatgttgctagcgtggccgaaatgactagcgcctcggggtcggtttggtgcagcgacacgttgaggtggcccagcttgcgccgcgtttcggcgtctacaacgtgcacggtggacaagtcgtggtcgaggactacaaattcgtaatccagcacgttggaaatgtagcgtcgctcgagatcgatcttaaaattaaattttcttagctcgtccgttgccgccacgcgcttgtcgatcaccccgttgctgagcaacttcagttgcgcgtagtggtgcagtttgaagggggagcacttgctggagctgaacggcaagttttttagcaaatcgtcagttgtgaacacgaacgcgttttctgcgcacgtgttttgcaaagcgtcgtccatattttataaataccttacttctgggcgcgcacagtcagtgacagcccgacagccatggccaccaaacgcgcccaccccgaagacgaaacgcacgagagcaagcgcgcggcgcaagagacgcagttgctgccgtacaacggcagcggtttcctcatgcaagtggaaaacgacggcgcgttgcgcaaattcacgcccatcaacgccatgcgcgcgcagcaaaacctgagctggcagtgcttggtgctactgaactgccaggcgctcgacttttccgcaataaactttcactacggcgatttgcaatatttgaaagacaagtttacggagctgcaaaacctgtctaactattacgaatggcgcaaacaggagcggcccgaggacaaggtgtgcatcatggaggccgccgtgggcaagtgcacctacacgattgggctgcgcgtcaagggccgccccaacgggttcgccatagccgagtttggcagcgtgcaccggtctaaaagcacctttggccagttcctgagcacgacgtggtccgccatccacgagcacaacagcgtgtttggcaaaatcatggacagctattacaagcacgagtatccgctcaagctggagtcgagcgtgtgcgtgcatttgccggaaaaggactacgagcgcgagatcaaggcgcgccagtttttgtgggtgcggcgtgacaacaacccggagctgtacgccacggggcagctggaccgcccgctagaagtggcgcccatgacgctcgccgagttcgatcggctgttcgaggtgaacaagacggacggcccgtcgcaggaggtgcccgtgctggtttgcggccgcatcgacggcgtcaagtacggcaaggagattcagatgacggacgtcaacgggcgcaagtttagcgaaaagccgtactcgctagcgttcaagcccgtgttgtatctcatcctcgagccctagtaagcaaaaatggaaaccgacctggccgcgattgtgcacaaaaagcgcgcgctgctgaatgccgcgttcaagcaacaagacaagaaaatcgccaaatactttgccaagccttgcgaaaacgacgccgaaaagatgctaatgttggcggccgagatacacgggcaggtggagcagctggaggcgctgctgtccgtggcgcgcgcgagcgacgccgacaagcgcgagtttgcgcgcgactgttccgacctagacattgacgcgcaggacctgcagcgcatgtgcgccagcaacgagccgacgtattttgcggccaagtatgacgcggccacggtgctggccgcccacccggccgcctacgacggctttttggggcacagcgaacgctttgtggacgccatgcgttccctgaacgcgcccaacgccgacgcggactatctggcgcagcgcaagtgcgcggccatcaggcacttgtgcgctttggagtatctggtcggtttgcacacaaaataaagttacaaatataataaaatttattagcaaacgaggtgtttcattcaaattgcacggcgcgttgtccatagtgcgtgccggtgcgcacgcgcttgccgcgaacgtagtccaccccaatctcgctgtcgcactcgacgacgcggttttgttgcgcagcgcgtttgatggaattgagccggcgcgttgccagctccagcgggttgtacagctccgacttttccagagtgaacgagttgaggtggcctttgttgaaccactccaaagacacgatcgtgtacaacagaaacattagcattttgtcgttgctttcaaaggcaaatttgttttttaaacagtagtaataaaattttaacgaattgtacacgtaaaacgtgaaatggttggctcgcatgtaaaattcgacgtcggttgcaaacagcaagtttacgacgcgcgtttgcagcaagtgggccagcttaagcatgtacaccatcgagtttttgtcgtcgtccacgcaaattagcagcacgtgcggtgtgtgcgcgttaaacgccaacttgaacccctcgtcttgcaacgcctgcacaacggagcgccaatgcgccgcagccacctcaaggcatatgtattttttcgaaaacacgtgccgctttattatctcgttgacggacgacagcgacagcagatatttttcaaacgtttcgtcttgccagccgcgcacgctggccggcgccgcggtgtcgggctggtgcttaaagtccaggccgctttgaatcagtttggtggttatcaaaatgctcagctgctggccaatcgtgtagtggtcttcgtacccgcgctcccatataacgttgcacgcaaacttgatcaagttgtccacgcgcggctgttgcaaaatgcggcgcagccgctgcgcgtcgcccttgcaccaccgatcgcggcacacgagcttgaagatggccgcgtcgtgcgcgctgagctcggggcgcgtcacctccacgtaatcgtccagatcgccggccgtggcgcgctccacaacggttaggcgctcgaggtgaaacactttgacgtcaaacacaaaccgcacaaacccgtcggcgtcaatctgcacggtgcgcgttacgcgccgcggcagttgcgcgcccgcgccactaatgtataagttgtaccgcaaaagaacgtcgtcgtgcgcgcggcacaccgccggcaggaactgggttgtgtagtgcagcgactgcgcaaacatggaaacgttggccatctcggacaaagagcagtttcaaacgcgcctggcgtacgtggccgatatcgccgcaatgatgcagcgcacgctgcaatttatggccgtgcacggcgcgtgcacgcgcgcggacgcggccacgctgtgtttggcggacgacaccgccgcgtgggtgtgcgggcgcggcgccgcgccggcgtttgcgtctttccgcgtgcgcatcgccgggttccagcacccgtgccgcgcgctggcccatttcatgttcgaggaaagcctggcgcagcggtgcagcaagccgctgccgcgctacacgtacatgaactacgcttttttcaggggcgtgcttgccatcaaattgagtgtatacgttggagacctgcacgccgacgggctgccgtactttgtggactttgcgcgcggccgcgcgctcgtgcgaacgcgcgcgccgctgcagtttccgctgccgccgttcgaacggcgcgtggaagaggccgtggcgcagtcggcggccaaatagccgccgcaatggacactttcaaggtgcagttgcaagagtttttttcggccggcgacggtgcggacgacgcgccctgcctggacgcgcccaacctgctggagcaccagaaacgcggcatcgagtggatgcgccggcgcgagcgccgcggccggccgcacggcggcgtgctcgccgacgacatggggctcggcaagacgctgtccgtcatgcgcctgatagccaacgacggcgatgacgcgcacaagacgctgattgtgtgcccgttgtcgctgctcaaccattggacggcggaggccaaaaaacacaacctgccgctaaacctgcgccaatttcacggcggtgacttggacgagtcctttgacgacgccaaggcggtggcgatcacgtacgacacgctgcgcgcgcaccacaaacattacaaaacggcgggccgcgccagcggcttgctggcgcggcactggcaccgcgtcgtgttggacgaggcgcacgttattaaaaaccaccagacgggtgttcacgcggcggcctgcgcgctcagcgccgacaaccgttggtgcattacgggcacgcccatccacaaccggcactgggacatgtacgccatcatccactttttgcgctgccgcccgttcgacaacgtgggtgtgtggcgcatgctcaaccgcaacaacgacaccaatcgcattaaaagtgtggtgaacaagattgtgctcaagcgcaacaaggcggagattgcgctcgacattccccagcacgacgtgcaggacgtgcacgtcaggtttgacgaggcggaagcgcgcgtctacaacgagctaaagagcgcctcgcagcgcgcgtacgacgacgcggtggcgagcgccgacaaggccggcggcatgcaagacgtgctgtggttgctgtgtcgcttgcgccaagtgtgttgccacccggcgctgacaaagtgcgcggccatgtttccggaacacgcacacatatttgagcccgcctacgaaagcagcaagtgccggcgcgcgctagaattggtgcagcgcgtgctcgacactcccgacgacaaggtggtgctggtgtcgcagtgggtggagtttttgcagctcgtggccgggttgctgcgtcggcgcggcgtgcccatcctgctctacacgggccagctgcgcgtcgaggagcgcaccgctgtggaaaaccagtttaacgccgccgactcgccgtaccgcgtgctgctcatgtccatcaagtgcggcggcgtggggctgaacctgaccggcggcaaccacatcatcatgctggagccgcactggaacccgcaaattgagctgcaggcgcaagaccgcatccaccgcatgggccagaaaaagcgcacgtacgtgtacaagatgattgttgacgaggagaacagcattgagcgctacatgaaagcgcgccaagacaaaaagctcacgttcgtcaacaaggtgtttgaccgcactgcgctcaactacgaggatatcaaaaagtttttcagcttgtaagcatgaacgcacagtacgccacgtgctatttgtgcgacgaactcgtgtacttgttcaagaaacagtttgcgcgcacctcggcatcggcggcggcgctgtaccgcaagcgcatggccattgtgcgccgcggcgtcgtgctgtgccaacgctgcagttccgcgctccatggcggcgacgaccctgaccggcgatgatggccattttggggccgcgaggcgggccggcggttgcgtggcgtttacggtgcgccgctacaaccgccacgtcgtcgggttttccggcattcgcgcgcgcatgctggagaaactgcgcgacgcggggcggcttctgcccgccgacaccaagtgcgcgctgcacaccgtgccggcggcgtgcgcgcgctgcaggcgcagcctgacgctgacgcccgccgtctcgtgcctaccctgcggccactcgtgcctgtgcaccgactgcgaccagctttttgcaaatgtctgtttcgagtgcaaaagcgctgtacaatttaagttaaggtttataaaatagcaataaaggcgcgattgtttgttattttatggtgttttatttaagacatgggcctaatcaccctcatcctcgcgctaattgtggtgctgtttgtttgtgtgtttgctagcaacagcagcaagcccgcgaacaacgcttcgtttgccgacaatggcgcgcagcgaaccgcgcgcgagtttgggccggcggcgcgcggcggcgagctgctagagtttgagcggtggttcaaagacactcttgcaaccgtgtttgcgcaaaaggcggaaaaggtggccaaccccacgcgcgcctggaacgccgaaaccgtgttcgacaatctcagcccgtggacgtcggcggccgactttggcacggtgtgccacacgctgatcgggtattgcgtgcgctacaacagcccgggcgacgcgctgcaccatagcccggacctggcaaacaacctgataagcggcctgcgcgcaatttgcgcgcggttgcccgacccgccgccgcaccagcaggcgccctgggggcccgtggccgactggtaccacttcacgatcacaatgccagaggtgtttatgaccgtgaccatagtgctcgacaacacgccgcactacgacgaggccgcggcgctgacgcgccactggctggcgctgtacttgccgacggccgtcacctccatgggctggcaccgcacggccggcaacgcgatgcgcatgggcgtgccgtacgcgtacggccagctgctgcgcggctattcggcgcagcaaattgcccaagagccgggtgtgcaagaaacgctgaaaacggtcgcgtttccgtacgtggcggcgggcaacgggctgcaccccgattccatatacatcgaccacctggacgtgcgcgcgtatggctacctcatcaactccttctttacctttgcgtactacacgcgactgtttggcgcggacgtggtcaacaccgaggggctgacgcgcgccatcgagaacgtgggcagccccgagggcgtggtggtgccgggcgtcatgtcgcgcaacggcacgctgtactccaacgtgattggtaactttgtcgattacccgattgccgtgcactcggccgacctgtccaaggtgttgaccaagctgtcggactcgtactacggcgccgtggtgggcgccaccacgcgcctcgcctactacgaggcggacccgaccaacaacacgcaagcgccgctgtggaccatgacgcggcgcatttggaaccgccgcgcgcgcgtcatcaactacaacgccaacactgtcatgttcgaatcgggcatcattctgcagtcgctaaacggcgtgctgcgcgtgcccagcaccaccacatccacacagtcgttccggccggccgtgggcaagacggcgctcgccaagacgcgcaccgcgggcgccatcctggtgcacgcgcgcttcgcggagatgaacaacttgcaattcaagtcgtgcacgctgttttacgaccacggcatgtttcagctgtactacaacattggcgtcgagcccaactcgctgaacaacgtcaacggccgcgtggtcgtgctcagtcgcgacacgtcggtgaacaccaacgacctgtcgttcgaggcgcagcggctcaacaacaacaactcctccgacggatcggcattcaacggcgtcgtgtgccagcgcgtgccaatcacaaactttaacgtgccctcgttgactgtgcgcagccccagcgccagcgtagagctcgttgagcaaataatcagcttccaaaacatgtacacggcctcggccgtcgcgtgctacaaactgaacgtggagggccactcggacgcccttcgcgcgtaccgcatcaacatggacgaggtggtgtacgtcactacgggcgagggcgtcaaagccctgtttgcctacccgtggctcatgctaaaggaagacgcggccgtcgttttcatgtccgccaacgaagacctagtggtgcccatgagcgtgataaacaacgcgtttagcgccatcgacgagcccggcctgcagtatgcgccggtaaactgcttcttgtacggaaacgggttcaggctcaacgacagtttggccaatttgcaatttcaatttgaaatcataaattaatgggcggcatgtgatttaggtgcaaacatttacgtcaagactgactaggaataaaacatttttttactcaacaatatttattatttacaataatcctttacaaacagcgcgtcaatttcctgggccagggcgtatgcgcggcgctgcgcggcgtcgcattccgatcggtagagaaactcgcgaatgctgccggtcttgtccctgacgcccatgcttgtgatttccgccggcacgcgcgccggcgccgcggccagttgcgcgtccagttgccgcgccgcggcggcgagctgcaacaactgctcgtccaacacctgtcgccgcgccatgcccgcgaatagtggcccgcggacgcgccgccctttatatgcgcggcgccacgtacacgtccaacttgataaactccagcccgttcttgagcacggcggtgaaaaaatcggcgggcccgttaaccggcaccacgatcttgccgcccgcgctgcgttcgcgcacgtgcacgagcgcgtcgccgaccaccattttgccgaaacactcgtacggccggcgcagtccgctgatctcgatgctagcaatggacgcgtcggccgtcgcgcggtcaaacgtaaacgacgcgcggttgggcgtttcaaatagcgcgcggcggcacgcgtggtgcttgtcaatgtgcacgcgcacgttttgtaaagcgtccatttcactgcgcgctctcgccaacactgggcacccgcggcgccaagtacagatcgagcgcgcccagcggccccaggcggaagcgcagtcgcagcggcatgctcgcgtccatgcacacgtcgacagtctcgctcagagcacttgctcgcgcaagtttgttcaagtagcagcacgcaaacgcctgcgtcagcggccgctgcggcgagccacgcagcaacacgcgcacgcgcacgccgtcgtccgcgtgcgccgcaaagctgaggcccgtcgtgccgctcgacatctccacggtggtcgcgcccagccgcgccaggtcggcgcacgcgcgcgtcagctcggcgctgggcaccgccaacacgcaagtgtactccttgtctggcacgcccagccggtccgcgtcgaggctgatttgcgccagcgtgcacgaaaccgcgcggcgcgcggtttcgtacgcaaggcgcacccggtcgtcgcgcgcggcgacgcgcatggtgagcggcgcgctcgggtcggccgtgcgcacaattttgaccagcccgcgcacgggcacgctgaatgacaacttgcgctcgcacgcgtagcgcgcaaatccggcgcgccgcaggcgcaggtccgccagcgcaacgcgttcaacgtcgaggctgtgcagccgcatgccgtgggcgtcgcagtcaaacgtggcgtgcgtcagcagcccgcgcagcgcgccaacaatgctttgaaaggcggcggccgttgcgaaggtggcctccattgcgagtgccgcgcgccgcggcgcgcgggctatttcatcacaacgttgttgcacatgagcaggctggacacgacctcgaactcgccgcagttttgcggcaggttggagccgccgcgcatccactgcaggctttccgccaagcggttgcccacaaacgactggttcttggtccattggtcgaagcgcgtgccctccaccttttcgtggcccgtgtagttctttttgttgaactctttgtaaatgttgtccggcgtgttgttaaacaacatgtaggggatgttaaatatggggtagcggcgcgcgcgcgggtcggcgtggttgccgccgcgcaccacgtacttgcgctccagtcgctcgaaattggactgccgcgagaggtaggacacgggcgacaagcagatttgcgcgtgcgtgccgtcctcggccatccactcggtgaggtcctcgctgcggttgagcacgcccttttgcccgtgcacgctgcacaccttgacgccctccaggtcgtcggtggacgtgacgaccgcggtgcggacaatcaccgcgtcgcccgccagcgtcatgctggcggcgagcgactcgactgcctggttgcgcgtgcgccgaaaaaacacgtacactttgtacacgttgtgcgcgccgttggtgcacgcctcgaccatgcaccgtttgccgtcgtgcgcccacacaattttggcgccgctcagcaccgtgcccgcaaagtactgcaccatgttgtcgggcaacacgacgcagttgtgcggcccgctgctggcgacaaacttgagcgttggcacggctttgccggctagcgcaagcttgccctttaacttgttgactttgtggttgtacagccggatgggcagcgccatgtgcgggatgtacgggtcctcggcggtcatgagcttggagtcgcgcaccagcgtccacaacttgaccatcttgttgttcatcaacacatggtcgccgaccgccacggacagcccgacgggcgccgtgcccagcgtgctgtaccgcagcaccggcatcgcgtttttcagatttgtcagggccactatcattttgggcaccggaatggtgtaaaacaaatgcgtgtactcagcaaagtagtactgctccagcttggacatgaggcagcgcacgtcgtcgctctcctcgatttcgcacgcgctgaccgtcggcgcgtgaaacagcgagtttttgtaatggtactcgtacggcgtcagcaacgcgttaatggaagcgttgacaggcgcgccaatgcgcacccttttggctatgcacaccatgccctcgtggtggttgacgtacaaaatgttcgaggacgcctttagctcgatcgggcagcggtcgcgctttagccggtacacaattttgggcacgtcggcgcgcgcgcactgcaagttggtggggcggtcgttgaacgcgatcagcaaggcgccgtcggcgcagtgcgccaagtcgtgcaccggcgcgaccaggccgaactgttgcaactctgcaaatttgtcggccaccatggcgtaatcgacgttgggcagccgcgcgttgcgacataaaaagaactttttccccgccacggtcatttcaccgtggaaaaaactgccaatgaatttgacaaagtcctttttttgcttcaacattttctggcgcacgctgtcgttggtgatgcgcgtgacctcgctgcccacgcggtacttgagcaccggcagcgaaatttcaatgttgttgttgctgcaattgtcgtgctggttggggaacgagcgccgctgcttgctaaacgttttggacacgcagtagatgaggcgcccgttcacgacgctgtccactatttttttagactctttgccgtagagcacgctttgcgctttgcgccgcttggacgctggcggctcgccctcgcactctaggcggcgcttcagcgcctcgttttcgccggcgcgtttctgatagtgctgcagcaccgtcgacgtcagcagcagctccatcaaatacgcgtgtttgtatattattttgttggccaagttgtcaatggagtagcaaatgtcgtggtgcatgatcattttaatgtggtcgaccagttgctgcttgtgcgccttgctgtatcgaaacaaatggtctagcgggcgccacttgccgctactggccaggtacgtctccagcaccgcgttgaggtcgtcggtcaccacgtaatcgctggcgtacacgtcgcgcgcgaacaggcggcgcgtcgccttgtcgtacaccagctggatggcgcggttaatgtgcttttcggcgtccacgttgccgtacaaaaacatgcgcttgcagtgcttggcgtacagcttgtcgtaaaaattgtgcataagcacgttgttgttcatcatgatgttgggaaagctgagaaaacgaccgtcgagcataaacgtgccgcgcaggttgttttgcgcgtcgaactcggcgctcggcgcccgcagccgcgcgtctagcgcggtgccaaacaccaccaccacacacttgtgcagcacgcagttgcgccgattattaagggcgcagcacgtgtacgatttgcgctcctgtatcgccgccaagtccagcgggcccgactccggcgcgcagcactccaacaccagccgcaagttgtgcggcggcgcctctagttttgcgtacagcgcgtcaaaatcccgcaccacgtccgtcatctcgccgcgcgcgccgcgcactgccgatggccacgtccacgcgaagccgtaaacgcggcgccgagcccgacaccgaggtcgtcaagcgcgcaaagcaaaacaagctgtgcagcttacaaaacaacgattttttgggcttttgctctttgcgggaaatcaactattacgaaacgctcaagctcgactttgagcgcaactttgaggcgccacagaatgacgccgactttgctctgctcgtcgccagaaaggcaaattttgtggccaaccaggtgcggcggtaccccagcgtgacggacgcgcaccacaacaacgcggtgcacgacgtgctgattttgattcaacacgcgcgcgccgttcttatggacaaaaacaaacgccgacggtacgacgacattgtggcccacaaaaattcgaacgtgttaaaaatatgcgacacgttcataagccagctggatcagataaacgtcgacttgtcggccgcgttggtggcgttcaagaccgcttcgagctcgttgagtggcggcgctgcgaacgatatcacaagcgcgttggtggaggcgctagaaaactggcttgccgcccagcccgttgtgatgaggcgcccgtctagcatgaaccgcgtgctgatcacgtggccgccgcttttggaggagcaagtttacaccaagtttcaaaccgagcaattgattcggcaagaattgttggcaagcgcgtccataaaaagcgaagatattgttaacgtgtttgtgtgcgacataaacgccgttgtggtggaattcaaaacgcaggagcagcaactggccgccatgaaaatcgacgagataaagagcaatcgttttaccgtgaaaccctacattctcaaaaacttttacaacgcgcaattgagcagacgcttaagcgacgaaatgaacgcgatcgacattcgcgcacaaaacattcgtgaacaattaaaaacggtgcacgctcgttatagtcagtcgtagtgccaatttgcgcgtattcactcgagaatacatagtaatacgtttacaaataaaacgccaaaataataaagtagtttcaaattatatgtcagctataaaatactcgcaactacgcattcgatttatttctttggcaccgcgtcaattaccgcgtactctggagacatgagtgtttgcgaagcatttgttattattcgaaacgcgctcgttattgcataagggcgcggccacactatgcttcttaccgtctatctgaaagacaaacagtattacctatttaaactgtttagggaaatttggccgtcgtgcacgaccgagtgcaggatttgcctagaaaccttgggcaccgagggcggagtggtgggcgtgcccgacaacgggctgctcaacctggacaaaatgtttcacgccgaatgcattgagcgctggaagcgcgggcgcaaccgcgaccccttcaaccgcgcgatcaagtactactttgcgttcccgccaccaacgctgcacgaatgcaaggcgctgctggagcacacgcgcgggttcattggcgacgacgaaatggaccgcgtgtacagcctcgtgcaccagcgggtcacgaccgaggacgcgctcgacgtggagctcaattttgcgcgcttcttcaaagatgacgcacgtgctgtcggcggcggccaatgacctaattgcgtgtgtgttaagagacaatttgttttcggcggacggcgagtgccttcggtatgtcgtgtgcaaagaagctggtcacgttgaatccgtgtacatcggtgaaattggtgccgcacaggcccattcgggcgaccaaaatgcagtgctggatgcatcctcggcgagcgacgtgtcgagttcagcgtcttcgcgacgcgtatcatgacgagcgcaacgaaagcagtttgctgcacatgactgtgtacagcgacattttcctggacgagcgcgcgcggccctactaccggcagctgttgcgcaaacgcacggacgcggccgcggcgcgccgcgcgtttctcaacgcggggcaagtgcacgactgcctgctgcttgagccggcgcccagtgagcacttcaaaagcattgaagaggcgggcgaaaccaacatgagcacgctcaggacaattttggctacgctgacaagctttttgggccgcgtggcgagcaccgagtacttcctaattgtggaccgcctgtttatcgacttggtgtactccgagtttcgcgcggtggtgctgccgcagcacgcgtacgtgctgcaacaggcgtgcgcggacaccgacagcagcgacgaggaaccgtgcgagcggggcgtcgagccgccctggaaccagatcgtggtggcggcccacgtggccgccgcccacaggcacgagggcgcgcgctacaacgagtggcagcgtcaatcgcagtacatttatcagacatttttggtgtacgcgacgttgctcacgacaatattgaaacagagcaacccgtttattattagcgaaaacagttccgcgtctgtggtattgcgcactttgggcaaatgccccgacaacccggagcgcgtcaattgctgcaagttgagctacggcggcgccccgccgggacacctcatgtgtccgccgcgtgccattgttaaaaaaatatacagatacgtgaattgggcgtcgaacccgcacaaggaccagcgttacagcgcgctaatcgcgcgcccgtccgacgcggcgacaggtgccggctcgggagatttacgggaaaacgtcgacggcaatttgcatgccgacgacattacgccgctgattttgctcgactgggacaattttgtgagcgcgttaatggactattttggcgcgccgcccggcgcgcgccccgcgggtatttaacggctgacctatttgcaaaacaaacattgatatccggactgattagcggctggtcgccaacatgaaaaaagtgtcgctcggaaaaattatagaaagcaccgtggaggataagtacacgtaccgctttgtgcgcgatcagaaaaagccaaacctcggcgagtactacaagacgttcgagagcatccgcgcgggccagcacagtagcacgtacgacgtggtgggcaagcgagactacaccgttgtggacaagctggttaaaaagtgctaacatgctccgcgcgctacggcgccgcttcaagcccgccggcgacgagcggcgccgcgaggaaaacgtagtgttgtgtcctcgttgttatttcgtcgcgcccggcagcatctccgtcgcagactacacaagaatgcacataaagtttaatgaacaatttgccgacgaatgttcaaataacttagctgtaacgcaacccaaaacttggtttaattacacaaactgtcccctactctattattcgttgtgttaataaatgtattttcgtaaatatttgtggtttcattcaagtgcgtgatttgcaaaggtacaccttgggcgctgtgtgtaaaggcgcgtttggcttgcaaagaatatttacaggtttatataaatacaattttcacgcagacgccgtgtttattatgttagatagcgagtctgtcgaaacacgtacatgatgatacaatctgtgcacgcgaaacgcttggagtttgacaacgtcatcctggacctgagccacctgcagttgcacgggccgcccgaggagcgctacattgtgttcctaaacgtaaagcgcgcgttttacaaaaacttttgcgtggagtgcgacatgtcgctagagacgtttgcgctgcacttgtacgaaaccgcgcggctgacggtggacggcgccgtggttccgcgcgcgcccgagtttgcacatcacatcagtttcaactcggcggaccgcgaccagtcgctggtgctggacttggggcccgacgccagaattgtagtggccaagcagctgcgcgccgacgagcgctaccaccagcgcgcaagcggcttcctggacttccagcggcgacacgagcggccgccggcgcccatcgagcacgacctggttgcacgaaacgcgctggaccgcgagttggaaataaaactgtacaccctgtgcgaatcataactttattgtggagttactaataatcgtcctcgtcgtcgtcggtgctgtactgcgcgccgcccccaacaaacttctggctggccaccaccttgccgattcgcttctttttgcgcgccggccggcgcgccttgccggcgccaaccaagtggtcgtcggagctgcgcgtgctaatcagctggtcgtcggagccgcgcgcgctaatcagctggtcgtcggagctgcgcgcgctgctgtcgctgctgctgtagctgacgcggcgcttgtcgcggttggggcgcgcgtggtcgccgggcggcgaggcggccggcccgtcgctgtctgaagacatgtcgtcgcggatgatttcgtacgcggcccgccgcggaatccactgcaggtcgttgacgcgcacgtagcgctcttccagcgcctggcgcgccttctgcatggccgcctcttcgtcgccggcgttgagcttgtgatgctgcgagaacgtgtcaacaaacagccgtttggcgcggcgcggcatcttctcctgctcatacagcgtatcgggcaggtggtacatcgctgctgtcgtccgactctgtgcacgtttcggaagaagaagacgagctggtggtgtcggcgtcgttggcgtcgggccgcgcgcgccactgaccgcggaccagcgtgtactttttgcggacggcgcagacggccagcttcacagccacttctcgagacccaaatttgcgcaggctgcgatcgtagaatttgtaaaatatcctcttaccgttatgcggcaagttgtgtaacttttccggcaacatatcaaataaaactaggtttattggcaatgttttttatttactgaggacggattgaatggcaagaacacacaaccatgagattcaacttgataacttaacctacttactgttggcaattaaataatgttctccagcatgcgctggccgtcggcccgaaaggcgcctgctttgtcaaaagcgaaaaggtcgttggttttgaggtagttaatgtgctgctcgtctttgactatgaacacgcggctcttctcgtcgcggcgcaccattacgccgtgcttgcatatggagatgtacttgtagaccggcagcaacgcgtcgcgcgcctttttcagcagcagcttttgctcgggcggcgcggccacgaaaatcttgacgggcccgtcgtagtctatgccgaggctgtggtttttcaggcgccgctcgcgcgacttgctctgccactctttggcgcgcgccgagtcgctcagcttgaccaccatgtggtttttgtgaaacgccgagtcgagcacgtgtttaaagtccaagtcgagcagcgcgcaaatttttttcaaataatatgtgcgcatttttttgctgcccagtcgcgcgtcgtgcacgccgtaaatttcgacgctgtcgttcaaccggtcgcgttccaactctttcagcttcacgttcatcgatttgatgtcgtccgattcgtcaatctgcgtgttaattagcgacttgagcagcgccacgttgatgagctgttcgaaccggtccatggcgccgcgatgtatttgtaaataaaccctcttatagtagtgggcgtcggccagctcgcacgcgccatggtgtcgtttttggacaggcccccgaccgagtttgacctcattttggaccccgccaagctaaacagcgcggcgtttttctccaacgacgagtttcgtgccgtgctaaaatcgctgatcggggacctcaaaaaaaaccaacggcccaattattttaacagtttggtcgaccagatgatcaacgtgtacgcgcacattagcgctggcgaacacgccgacgcgcttgtccgtataattgacgccacatgcgtcgtcgtcacaaacttgccatcaaacgtgtttttaaaaaagctaaagaccaacaaattcaccgacagcatagactacctcattctgccccatttcattttgtgggactacaattttgtcgtgttcctaaacaacaccttcaactccaaacacgaaaacagcctcgtggacatttcgggcgcgctgcaaaaaatcaaactgacgcacggcgtcatcaaagaccagctgcaaagcaaaaacggctacgcggtgcaatactcgtactcgacgttcctcaacaccgcctcgttctacgccaacgtgcagtgcctgaacggcgtgaacgaggtgatgccgccgctgcacagcgtgcggcgctactttgggcgcgacgtgccgcacgcgcgcgcgtggaccacgcgccaccccaacattagccagctgagcacgcaggtgtcggacgtgcgcgtcaacgaccgcgacaccgactggaacgtcaaagtggggctgggcattttccccggcgccaacactgactgcgacggcgacaaaaagatcatcacctacttgccgcggcccaactcgctcatcgacctcgagtgcctgctgtacggcgacccgcgatacagctttatttgcttcgacaaaaaccgtttaacgtttgtgtcgcagcaaattttctacttgcacaaaaacgtcgaggccgtggagcgccttttgaaaacaatgccgctggcctttgcgctgtggcgcatacacgccaacgtcaagttttcggcgcgcctcgaattgttgctgcgcgatttttgcctcgtggccagctcaaacgccagctacctgctgttcaagcagctgaccgagctgatcaaagacgaggaaatggtgtgcgccgacgaggagctgtttgggctgtccggccagtttaccgacatggtaaacagcggcgccaaaggcagcgccgcgctcatcgaaagcacgcgccagtatgcgcgcacgcgcgccacagacattgacatcgtctccacgcgcgccaccaccagcttaaacagctacatctcgtcgcacaacaaggtgcaggtgtgcggcgcggacatttaccacaacacggccgtgctgcagaacctgtacattaaaaacaactacatttgctacaaaaacgacgatcggcggatcgccagcatttgcgcgctgccgtccgagtacttgtttcccgagcatttgctagatttgtttattgaatagcaacgctaacaccgcgattagcggtcgtttgtatcgaaaaacaaaacgtgcctttgcatattttgctacttaagcgaattggggcaataaaacattttctctcaaattcagcgtttaattttcacgataaaataaagagtaattaatgtttgaaactatattttgtggagaatgcaaacaaccgcaaagggcgcttaaccgaaagttagagcactcacgatattaaattcaaaactttgatgttttgttgaaaacattaatataatataattttgttaaatgttcatttgactgaaaggcttcaatagtgcgccgtcgaaaactttgccgcctattgttgcgcggtgttggccacccgcgcaatttatcgctcggtcatggacgcttgcacggcctcgacgagctgttcccgggtcagattgcttagcagcgtgattttgttgtgccgggctttgaatttgtcgcgcggaatggactctttcaccttgttcagcacgttcatggaattgggcacgtagtcgctgcggaacacaatgtctccgtcgtccaccgacaacctgttcaaactgcggcgcagcgagcgcttttgcgggcgcacgaacgcaaactcgttgttgcccagcgcgcacacggccagcgcgtgcagcactgcgggtcgctcggcttggcgatcactcctgcgcgatgtcggccatgcggttggccatgtgagctaggttctcgttggccgttttaaggctgttgttggcggccatcaacttttcgttggccacaattgacgcgttggcaaatttaacaacctgctggttggtgtccatcgtggttaaactttgaattttttcttccttttccgcagcgttccgcttgtacgcgtccaaaattttctcctcctgaatttcgtcagtgtccatcttgacgaccggcgcgtacttgcccgtgcataaaacttgcgggattacctcctccagcagccacgcgttttttaaacacgactcacttggcaataatcaatggcgcaccgacgctcacaactcgtcaatggtctcgcgcacgctggcaccgtcggcctgttggtcgtgcgcgccgccgcggcgcaaataattgtgggcgcgccgttgcgggcgcgttggcgcgcacgattcttgggggcccgcctcaacacaatcattgcacaggttttgttgccgcagctggtcgcgcacggccttggcggcgcgcgcgtaccggcactcgtcgttctcggtgccgaacacgaggtcggcgcagttgtagaagccttcgcccacggggtcgatgcgctgccagcgcacgtacatgacaaacgggcccggtcggtacggcaccgacacggggatagagtaaagctgcccgctggcgcaaaacgcgtcgcccgggttcggcaccagacccgagccgttgccgccgatgtactcgagctcgttccacgtgacggggctgcgccggtcccacgtaaacttggtgacgtacacctcgaagtagctgggctcgtgcacggccgtggggcaaaagtgcacgttgaaggaatgcgcgcgctggtaccggttcacatacagcacgtcgggccgccagttgtggaacggctcgtccatgccgctcttgtcgccgaacagcgcgtggcggtcgttagccgcggcgccgcacagcgtgtgcggcaggacttcgcgcttgaccagttccaggtcgcggtagttggggccggccaccgccgcgtactcggcgtactgctgaaacatgtactgcgccgcggcggccgcttcgcccggcggcgcgcccacggcgcggtatcggtggaacacttttttgtacgcgttgcggcacgcctcgtccggaacgccgtcgccgttgtcgggccagtaaaagttgccgtccgcaaagcatttgtactgcctggcgacgggcgtggacaggtagccgtgcgggcgcaccgccggcaccgccagcgcaaacaggacggcgcaaagtttgtacattttgtggggcgcttaataatacacaattgagtaacgactgcgtttattgtgctttgtacagacaaaacttgaacgtgttgttcgcgcacttgggctcgcacggcgcgtcttcgtcctcgctggagccgctctcgtcgtcgctgggcgccgcccctttgcgcgcgcgtttgccggacgcgtcgctcgcgctgggcgcctttcgtttcgtggcgattttgaccagcgcggcgcgctttttgtcgtacgcttggtgctgcatgtacttttcgaggatggcgctgtagcactcggccagcgcgtccttgtgctcgtccccgaatatctctagcagctcgttcataaaagtgtttaagatggtcatgtgcttgagccaactgatgcgcatggtttgcgcgtcgaacaaacgcagcggatacgccttttgcgtcacgttaccctgcatgtcaagtagcacatatggaatgcggtcgccgttgccgggcacaaagtccgtggccttgttcaccaaaatttcgcggcagtggcgcgcgacggtgatgacgcgccgcttcgggggcgccgcctcgtcgtcgtccgcggccgttttgccggcgccgtcgttgtacgtcatgctgaagctgtaatcggtcaacggcttggtaatgccgaacgcgtccaggtacattagcatgttggcctttaggctgtctaaacatttgctcaggtcctggtggcgcagcacctgctcgatggcggctcggaatgcgacgcgcatgaacacgggcatgtccttcttgaccaaccagcctttgaacacaattttattgttgttgtttatgtagcaatattttttctttttcagcaaaataagcacgctcatgaggttttcaaacgccattttgtaaccgttggtgaacaggccgtttacgcgggcctctacggccgcgcaaatacggccgagcgtggccatgcggccctcttcggggatttcctcgcgcctaaacacgggcagcacaaacgtcgagtcggtgtcgccgtacaacactttgaacgtaagcgttgacaagccgaactcgcgcaaaaggtccgggtcgttgctgagcccctcgactgtgccgatggccgcggtcagcttttcgcggcccacccgcgtaatgtggttggccagcagcttgcagaaaatgccgtaatagccgtaaatgctgttggccgtgcgcttgctcagattttgcatctggtcgtacaggtcgtacaaaaattccgactctgtttggctgtcgcggcactttttgagctcgctgcgttgcttgagcagctgcagcaacagctgcacgtttatggcttgtttgtcttggttcaaatacacgttgccgtcttcgcacaatatcaggttggtgaggcacgcgcaaatatcaatcatgatggtcagatacagcgagttgaaatctagcgaaaacgcaaactcgtacacgccggcgcgcggctgcagtactttgccgccctcgtacttgacgttttcgtcgatggcgcccaagcgtatggcggtggcgggcacatccttcagcggtatgcgcctgcgacgcaggcgcgacatgcccgttgtcaaaccggcgcttcctttgctcgacatcagccctaggtcgtctttgttgaagaaatacgggtcggacacggtgaggccggtggcggggtccgcgcgcgtgttggtcagcgccaaatgaaaaaacgtgctgctgatcaagtgggatatgttgcatataaaatcgtcggtgcacagccggtacatgatgcactgtgagtacataaaatcggtcagtttcaatttgttgaatagccgaattggcaacaggcaatcttgcacgttgtacttgattattgtgcctaactgcttgttgttgtacatctccaccattgtctgccaattcaaatcgaccttggcatcgcccaaatagtactggctgagcgtgtttaattgaaagttttccacgtcgcgcttgttggcgtccacgccaaagtatttgtacaaatcgatgtgaatgtagtaattgaagtagtaggtgtcggtccggttgccaattttggtgatgaacagcttggtgtttggctgcatagccggcaggtcgtaccgccgcagcagcggcttgtcgcctttaaggcggccgcgaatgtacggcaagtcaaacacgtcgccgttgtagtccaaaataacgtcggggttgacggttttcaaaaattcaaaaaacgccgttatcatgtggttttcgttgttaaacaccaccacgtaggtgtcgtcgctagcttgcgggatctcaacggcctcgctgtggtacacaaaacacaccttctcaaagcggtcgttcttgaacacggccaggccaatgcacatgatgacgtcgcactcgggcttggagctgttgtgcccgtccgagtgcgtttcaatgtcgtagcacgccatcacgggcgcgatgttggtcgtcagcgtggaggggtccagcacctcaaagtcgtccgaaaagcgctccaacgcgaacgggcgcgcgtcgtcggcgacgcaattgttgcggcagcgctgcgcgcggcgaaaccgcaagtacgtgccttcaatcacgggcgtctgcatgtgcacgcgattggcgttgtgcaaaaacttgtccagcgccatggtcttttccccaaacgaactgccgttgcgtttgaattttatgacgttgatcttgtccatgtacacatttttaacgcccggcgccacaaacgtgttgtagctagagcagcggttgcggcacgtggcgaatatgtggctgttgtggcacggtttgtacgaatacaagtccatcttcatgacaaagtaaaactgcgccaaacgcccgcccagttgcgcgttgcaaaacgccaccaaattgcccccgccttcgttgtagtagatgcgcatcacgcgaaacgcgtcgtcgcgcgacaccgcaaagtcgcgcggcgcgtagtcgcgaaacgcctcctgcagctgattgtaagtgaggattttcatttcgccaaaatgcagcgcgatttgctgagcacaatcaattccatgagcgcgcgaatcaaggcgctggagcggtatgagcacgctttgcgcgaaatccacaaagttatagtggtgatgcgtccggggttcaacctgcaggtgttggaccccgacgccatgccggcgctaatcgtgcagtttttttccgacctgacgggccgcaacaccacgcacaacataaactaccgatacgactacaacgtgggcggcgcgctgccgttccagccgccgccgccacaacccttctacccctatggccaatattggccccaacaaccgccgcagccacctcccgaccaaccccaacagccgcagccgccgcagcagccgccgcagcagccgccgcagcagcagccgcagccgccgcagccgccgcagcagccgccgcagccgccgcagccgccgccgcaacagttggcgctcgtgcagcaaatagaattatcggttgacgaagtgcgcgagctgcaagccctgcaattaaacatgcagcagcaaaccattacctggagccattttgccacgtttatcggcacaatgacgcgtattttgcaaacgcgcgtcgtcaacagcgcatttttgatcggcgcaattgaagcgctgcaaaacgtcgaccgactgaccaactacgactttaacgagtttttgcgctgtgtggccaacgagaccgcgctgcgtttcgaaattgcgccggacctgtgtcgcgtcgtcgcggcgtttattcaattttttcaaaaaacgcacatggttgtgtaccgcacaacgtttacgtacgtaaactcgcaaagcctgacggccagtgctgaggcgctgcaccttgtaattgttaaactgttttggtttttttccaaaatttacgtgtacgtcatgagggccgagtttgtgtacacgaattcgacggctttagcggccacgattgaggagctgtatgcgcgcgtggaggcaatccctgtcgcggcgcaaaacagcgccgagttggcccagctgcacgcggaaatgcgcgcgttgcgcaccgtcactgccgaccttcaaggaatgcgagattcggcggagcagcgtttgcaggccgcgaacgcgcgctacgaagccgcggacgccaagagccgcgagttggatcagcagcttgttcgactgaggccgttggccgcccaatcggagacgctgcgcttcgagaaaagcgagctggccactgaaaacgagcgcctgaggggcgaaattgccgcgttgcaaaacgcgtcggcaaacggtttggccggcgcggaaacggtttccaggctgacggcgtcgctggccgacgcgcaagcgcaattaacggcgcgcaccgcggagcaaaacctggtgatggcacagaaagacaacgagtacgcaacaaagacacagcaggccgccgccgattacgtcgccaagcttaacgccgagcgcgaagcgtacgagcgcaatttgcgggctaaagaggacgggcttggcgcaacaatacaacggctacaggaagaaaatgcagagcttcgaagcacgcttgacaacagaaaccgcgagtttgcgcaaggaagtgatcaatttgccgcggtcaacatgcaattgaacgaagccaggcgcgccgttgccgaaaaaaatggtcagcttgttgccgccaatgaaattagggctcgtctggagcaacagcttgcggacgcgacacagcaattggcgaaaactgagcagctgcttgtgcagcagcaaaaatcgggccccatggaaaccgacaagcaagagataaacaaggaggagtccgattacttgcttaccgcgttggacattatgtacaaaaacgcgaggattttgaaccccaatttgggcggccgggacctgtcgcaaaacctaaacgatctgcagtttgggctggcgagcgagcagcggctcgcgctggagcagtggttcagcactttgcgcgaaaccacggcgcccaacgacgtgcttaatttcgcagcgcttacaaacgtcaacgacctggtcaacgacttaaagagccagattattaccaaaattccggccaacatgctgcgcacgttcgacaatcgcattgtcaaaccggaagaggctggcgcggtggataacgttacgctcatcagtgccgtgtcgcggctggtcgacgagtattcgcggctggggctggagaatgcccagctagaaagcaccaacaaaacgttgtatgacgacaacgttacactaagcgaaacttgcacgcaacagttgaaaagcttgcgagacgatttgaacaaaaacatgagcaacgtggacgcaatcaacgacttggtaaaaaccacgcccgagttggacaagcaggcgatccaagacgttcgaaccgagcttagcaagactcaaagtaggctaaagagtttgaaagaggccaagcttgtcgagttaaaacaaatggcgagcacgagcgcgctagaggaaatgagcaaattaaacaacaacattcgcgaaataaactctttattatcaaaacacgctgcaattacagaagacatattcaaatggaaaacgacaatgctggaggtgtacgaatcgttggcgcgcacgatggccgaagagaacgtgttgccgccgccaactctctaaagaaattggtactcgcattcttcgtcgtcgtgcttgaggagccccagcaaattcattgtgctagcgtcggcgttgtcggcggtcacaaaaatggtagctttggtcaacttgtcggccaggcacgtggcgagttggtcgaaatccatggccagcttttgcaccgcgtttgtgtcgttgggatcctctttgttgccattactgtccacatagtacacgcacttgtgccattttgtgtcgtcgtcgtcgtccatagaatccaaagttttgaattgaacggaaaaactgtgttttccgttgtcgttgatcttttgctccgccttaaacagcgacagctgcatgcttttcaagtgtttattggcgcgactaatgttgtttgtggaatggctgtgaacaaggtttatgtaatcttcgttgtcggtgttgctgggcgtttccaggctcgtggacggcccggccgtccaatttaaaaactcgttttggcccttgcttgtgtgctgacacctcacgccgtgcacgtaaaacagtgtgtttgtgtttttataataaaagtccatcaaactgttaaagttatcgggcgactttacgaacgctttagccgcgctcgccaacactttgagattggcaaagcattccacttgctgcacaaaaactgcgccgcccgcgtcttgcatgttgatgtcaaacaccatcttgtaattgttggcgccaagacgtttaaacacgcattttagtttggccaacacgttcacaatttcctcgttttcaaaatccgcgcgcgttaaacagagtttaacggccacgttttcgtctatggccgcgtcgcatttgctgtattcgttaatctcgatgcgctcgttgtatttggttttgacaaagtttaagctgacgtcgtaacactcttgctcaaccaagtccttgaagcactgcaagttgccgtaatacgcctcggttttgttttcgttcaacaaacgaaacgtgaacgtgtagtacaggtgattctccaaactaattgtcattttgctgagcaacttgcccgtcacccgcttgtagttttccttcacccttttgcgcgccggctcggcgccgcagtccgcgtgctcgcgcttggcggccatcatgtgggacacggtgcgttggcaggtgctgagttccgacgaggtggaggtagcgcccgatcaccgcgcgctggcttggcgagaactgatcgctaacgtggcccgcgacacgccgcttgactacacttttcggacaatgctccagcgggccgatcttgaaaactttgactacaacacgccaatcgtgtacaacgtcaagcgcaaagagctgattgttttgaacgagagaatgagagcggcgcttcagaggcccgtccgtcgcagcgaccgcacaatcaatgccaacacggcgcacgttttcctgctatttatcctcgcggtgctgctgaccgtgttggtcgcgttttcgccgtggcccgacacgcgccgtgtcacggcggaaacgcgaacaatttagcgcgccgcgtttgtcgaccggcgcgcctagatgtggcaaacaagacctgcgcggcgacatgacgcgttgcaaattttacaacgcgatgtcgccatcgcgctgctgcgcaagctctacaaaactaagcatggatttgcaacggttcaattttttaatcatgaccacgcaggggcgcgtggccacgatgtccttcatgtcgctggaccacgcccaaaaggtggacctggcaaagaccgggttgttttttcacaacaacctaatcaaatgcattggatgccgcgcgacgatggacagggtggacgcgcgccgcgtaaagcgccacacgtactccgacacctgcgtatcggccattaacgcgttggtggccaacgagagtttgcgcaagcgttcgttcgccagttttaagtgggcgcggcgccagtttgggtcgcgcgccagggaggtcgacatgctgagtcgccgcgggttttattgcgtgggcaagcgtttgcgctgcgccggctgcaaggtcgtgaccacgtgcgtttcggtggacggcgcgcagcgggcgcacgccgctgactgcgcgtttcgtcgcgtgtttgacgtcgacttggacgcttgcgcgttggcaaacgttgtgcgggtggacttgccgccgccacggctcgagccgcggcccagcgcgccgttcgacgccgccgtgtccgaatgcaaggtgtgctttgttaacgaaaagtcggtctgctttttgccgtgccggcacttggttgtgtgcgcagaatgctcgccacgttgcaaacgctgctgcgtgtgcaacggcaagattgcaagccgcctcagcaccatccctcaataataagacataaacaccttttgtattgtatgcctggaaatctacttgcttactacaaactcaagctcgctaaaagcgtgtccaagactgtttccgccttgctgtgcaaatgcgtggcgccggaagacaacgacggggaccggtacttgcagtttaacaacaattgcaattttatttacatttatgtggtgaaataatacgtttgttgtatttacatgtttatttttaataaaactatatcaattaatacatttatacaaacaatgcagtttaatttcaaagattcgtagaacgacctgcgcggttccgcaacctcgtcaaacgatattgcccttgcacgaaatgacagctttgttagtatcaactcgaagtctgtgctgttgggcgtcgtcaaaaacgcattgacttccgaagccagatggagcgcttcactttgcacatctagcaacgctgcttggggcgtcatggctcaaacgttaggtcgcaacacgtgaacgtggtcacgatgcaattgggcttaatgtaccccgcgcttgtgtcgtacaaattggcgtcggtgctcaattcgttgttgagcacgttgagcaccgcgtttttaaatgtgttggttttagcggtaagcgtttgcagctggtcctgcaaaatcttgtgcatgctctttttgaattcggcgtcggcggccagccgcgaggcgttggtttccagccacaatttaaacggctcgtccacaaactgcccgcgcaatatttcgtacaactggcgagccaacgagtacacctcctgcacctccctgatgtccaactgtttgctgagcgtgattacggccagctccacgatttcttgcaactgcctgtagtattcgacgtacgcgggtttcagccgaagaccgtccaccgtgtaatcgtcttgcgcggcgcgcagcgttcgccgatgcggtttgtcggtcgcggcgacggcgggcgcttcgccggcgtcgctcatgttaaatgctcttataactggtacacctcctccacttgggccaccaaataattggacagctcgctgatgtcgtcgtccgacaacctgtagccgtccacaaatttttgcgtgatgctcatcattttgcggttgttgcgaaaagcgcgcgcaaggtagttgatttggccaacggtcagcagcttggaggggtctattgtgttcaccagacaatagacggactcctcgtccagctgtccgtcgacgaacattttcagcacgccgcgccacttggccgaaaaccgctcgtccgggtacacttggctgttaagccagtcggaaaggcgcgccttgacaaaaatcaccttggcgacaaactccgtcgactttttcagctcggcaacgaaccccctcaggccgccggccatgtcgtcagtccaaggagctagtgtttttgttaagaatcgcgtccagcgcctgttcaatttccagcttcttgcgcacgctcttagctttatggctgggcaggtcgtttgcggccgattcggtattcttgcttataaacgccggactgatcagcacaaacaccagcaccagaatgagaaagtaaaacacgatgccgttttccttcttgtcgtacaccaggctgaacacggccagcgcgcccagcaacaagtacaaatgcattttggcccttactaatctccagtttggtagtacagcgaggaggaattggccgacgagccggtggacgagtcgcggttgttgccgcccgactcctcgtcgctgctgctttcgtcaaagttgtacttgttcaaatacggcttggtgctggccggcgactcgtggttcatcaagcgcgccaccttctgcaacggcacgccgctgttgtacagattgctgctcaaatagtgtcttatcatgttgctgcgcgggcgttccatctccacgcccgcctcgtccagcagccgccgaaaatccttgaacggcgtcgaggtgtttttggaaatctgcaacacggtggggttgcgcgcgtagatctcgcgcgccagctccagcggcttggttttgatgttgttgagcgtgtttttgcggctgcgcttgcgcttgagcccgattgtgtcgctgcgcagcttgccctttttgatgagcacgttaaggtcgtcgacgctcagctgtcgcgcctcgttgatgcgcatgcccgtgcccagcattatgcaaaacacgatggcgccgcgaattaggccgcggtcgtgcacgtagtcgctgttcattagtttgattttggaatcgataaagttgaggatggtgtcgatggcgtttttcagcataaagtttttttctttctcacgaattgttttgagctccttgtcgcgcggcagcatgaccatgcgcggaattttaaactcgggcaggttcatggcgttggtgtaaaagttgatggtgagctgcagcgtttctttggtcacggagcgcagctccagcatgcgcttgcacagctccttggggctcaccagcaaatgctggaattcgaccgagtcaaactccctgtccaagtcgtaggccgggttttgcaagtccgcctcctcgacgaggctaaagatgatcttgatgaggcgcgacttgtagctcttaagcgtggtgggcgcaaacggcttggggaacatgtatttgctccacaagctgtcgttttttacctcgtccggcgtgcaccgctggcggtcggtggccaggtcgaacacgtgctcgaacctcgacgccgactggatgcgcgccttccagtcgttgaaggtggtctcgttgcggacgcccagcccgtccatgttagtcgaatttgttaaacgcaaaggggggatcgttgtcaatatcgtcggaatattgtggttgatctcttagtattacaaaataatagattacatacagcaacaaaaacagggccacaaacgcgaccagcccgatcagcacgatcacgccggccgaccactgttccgcgggcggcgccgcctcgccgcccgccgcgcgggcctcggcgtattcgtgcgcggcgggcggcggcgcgtcgtcgttgagcgccagcttgagcggaatgtactccacgcgctcgtgggcgcccaaccgataatagggcacgtccaggttcatcgcaacggcttgtcggccgacaggtattggtgcagaaaccgcggctgcgctttgatcaggcgcagcttgaaatatttgccgcgtttacgcttaagatggtattccatttgggccgcggtcttgtgatcgtacgcgctggcgctgcagtagagcagctgcaagcgcttggcgccgcgcaggcaccgcgcgccgacgccgcgcgcgtgctcgcccagccgccggctcaggtcgctcgtgatgcccgtgtacagctggccgtcgtcgcgtcgcacaatgtacacgcaccacaccttgctgcgatacaaactcatggctagccgcgtgtcgtcgggaccgtgttgtggttcatgatcatgaacacaaaccgggtgagcgtttcgcactgcgccgccaactgggacaagctcttctggcacgcgctctgcgtcaaatgcgcggccggcgagttgatggcgtgggcggccgccgtaagaaacgccgcgttctcaaacatgtcgggccgcttgccttgctgcgtggccagctgcgcaatgtagttgaagatgtccgccgacgcggatatcggcgccaggaatcctacgttctctttcagccccaccacgcgcgcgcggtttttttcgttgagcacgtagtagtaataggtgccgccgccggcaaacagatcttcgataaccgcgttgatgaggtcgttaatcatgttgatgtgcacaaagctgcgcgacttgacggcctcttgcatgttgtcgggcagcgtggcgcgcttgagcaacagcgttacgtaattgttggccagctgctggtcgaacggcagcgggatgggaatgctgcacgtgaccgcctccgacaccatgtactgcacggcgaggctgagctgcttggccgcctcgttgagcgcgtccttgcccagcgtgttggcgccgccgttgtaaaacttttgcgcgtacgccggcagcgagttgagcacaaacgacggctgaaagatgttaaagtccgacccgattgcctcggccacgctgttttggcgcagctctttctgcagcccaatcaaatggcgcacaatgtcgtcgtcgctctgcgcgcgcttgattatgttcgcgctcacggggttgctgtcaatgcacatgtcgcgaatggtgttgataaactggatcatgagcggcgtcagctccgacatgtcgttgcaccggtaatagcggatgatcttgtgcacgtaatcggtgcacttgttgtaccagatcgcttcgcccacgtcgcccgccttggccagcgccgtgttgctgcggctgtctgcgcgggacagcgtggtggacaccgcggtcgggtagccgctttgcgaactggtcaaagttgcgctggtgggcgcaaacgggtggcccgactgcgagggggtcaaataaaagccgtcgcgctcattcatggttttttaatgcgttcttatgattgcaaaatacaacgtgcgggttacttattatataattgttgtggcagaacagcgccagcaatatgagcaaaatcacaagcaggttaagcgccgaaaagttttccacgttgaacagcagcagcaagatgacggagcccagcaacagcgtctgaaagctgacgcgccggcacaggatgctctcgcagttgcgaaacgccacgttgaagccgttttcgccctcgatatatctgcggagctccgccttgcagcacgcgtcgcacattatgtgcaccttgatgatgagcccgtcggtgtgcaccgtttggaacgtgcgcggctgactgcccgggtggaactcaaactcgtagccggtggaggtggacacgtgcgcaaagtagtgggccaggatcgacgcgcccgtcttcttcaccttcaccttgtacaccttgatcacattgatgtcgctgtacggtctgtcggcgccaaacccctcgtacaagtactgcagtaatagctcgctgtcgtatttaatcttgttcacgctcgtccagtttttgctttttgggcgacggcggtgcgtcgccagattctggttcagcgcggtcggcgacagcgccttcctcggcaggaacgggttcgggttcatgatgcggcggcgccacggcgcgcttcttactattccacaccttcagcctgaacacggcgccggacacctttatgtcgtcccgtttggcaaacagcatgacctgcgcgccaaagcggtttgcggccaccagattaaagtgaaacgtgtagtcgccgagcgcaatttcattgtaaggcccgttgtgcagcgcgtccagttccggcgaggcaatcacgcgcacctcgtgcgcgcccctcattaagcagtgctcgttttcggcctcaaactccaacagcgttccctcgtcgtccgcaatcaaaacgcgcgctctgacaacaatgtccgacgtggtgctgctcgtgttggccattattttaatcacaatttttacgcttatctattacacaatatttttcgaatttgacgaaacgaccttttccaagcggctgcaggtgttgactgaatacgccaaacgcaccaacgccgacaaaccgacgccggacgtgttgggccacgtatctgacgtgtacgaccacacgtacattgtcagctggtttaagaccgacgacctgagcacctaccacgaaaccgtgcacgacgacacggtggaagtttttgattttctggagcagcggtttgccgccgcggcggcggcggtcgcgcaccgcgtggcgccgctggccgccgagcccgacgcgtttgtggtgacgggcgacgcgggcgacgtaaagctgcgctgcccgcaacacttccgctttgactatgaccagctaaaatgcgtgcccgtggacccgtgcgccggccgcgcgcccggccgctatcccatggacgagcggttgctcgacacgctggtgcacaaccagccttcggacaaggactattctgccggcgaacacctgcaccatcccacgctgtatttgcgctgcctggcggacgggtcgcacgcggtgcgcgagtgccccgacaactacacgtttgacgccgcgtccggcgagtgtcgagtcaacgagctgtgcgagggccggccggacgggtttgtgttggcctattttcccgaaacactgcgcgtcaacgagtttgtggagtgccgcgggggcaagcacgtggtggcgcgctgccccgaccagcaggtctttgaccgcgcgcttatgacttgcgtgcaaacgcacccctgcgcgttcaacggcgcgggccacacgtacattacggccgacattggcgacgcgcagtttttcaaatgcctcaacgatcgcgaggcgcagctaatcacgtgcattaatcgcgtgcgcggcgccgacggccagtacgcttgttcgggcgacgcgcgctgtgccgacttgcccgacggcacgggccggttaatgcacacgcacaccgacgacacgttcgaatacgtcagcggacaaacgatttgcgacaactacaatgtcatttctgagatcgaatgcgacaccggcaacgtgttggaaaataaattgtttgtaaacaagtttacgttgggcgcgcaatttccacgcgaagtgcttgacgccggcgtttgcgcgccggccacgctaaacaacgtgcgcgtgttgagcgatgcgtttcccgtcgaaaacctacccaacgattataaagtggacatgcaaacgtccgtggtgggtcttgcgactatgatggcggacctgacaacgggcgctgacccggacactgcgtttggtcaaaacgtgctgttggcgcgcgaggtggacgccgtcggcctcagcccgctcaccgccgagtccattgactgctttggcgcgcgattgtttgacgtcatggacgcgcgtcgcgctaacgtttgcacggaatcgggcggcgacctgctgcgaaccattgaatttggcgacggcgcgtttttgagtgtgtttcgcgacgatttgaccggatcggacgcggattacaagcaattttgcgcaatatcctacgaaagcccattaaaaatcgtaaatagcgatcattttgagcgccgtatattggccaatatactacaggcagacatttgcgccgagctatacactacgatttaccaaaaatatactacactggcacggaaatatactacagcgtctcccaaatacaactacactttcgtaaaacgccctccaaatatagtagtatatgcagaaaatacacatttaaaaaactctacgatttccgtgccaacgtttgacccctttgcgccgcagccggccgacaacaaaatcgggcctacaaatgcgctgtttgacccgtttgcggacagggtttggcgcagcgagccgggcggcgacggcgaccactgggcgcccgaggcgccgccgacacagcccgaagcgccgccggcgcccgagccgtcgccgctaattttggacaaaaaggagttgttttattcttgctattatgaactgcccaccttcaaattgactagttgccacgcggaaaacgacgtgataatcgacgcgctgcagcaattgcgcgccgctgtcgaggtcgatcccggctgcgagccggccaaagacttgcactttgtgctaaacgcgtacgcgtacatgggaaacggcgttggctgtcggtccgtgtttgacggcaataatgtgaccgtaataaaagagcccgtgcccacttacacgttcaacaacttgcaaacgcaatcggacgatggcgttcgttataacaagcatgtgcacgtaaaagacgggcgctacatggcctgccccgaacatttgtacgacggcgccgcgtttgcgtgcaatgcggaacccgataaactgtactatttggacaacatgcaaaaataattatgaaatatatttggccacgcgtcaacgccagcccctctttcaagaacaatcgttctggtaaagcgagtgctatttttagcggtgcgtcagcgccggctctgtttttcgagaataatcgttctggtaaagcgagtgctatttttagcggtgcgccagcgccgacccgctttcgagaacaatcgttctggtaaagcgagtgctatttttagcggtgcgtcagcgccggccccgctttcgagaacaatcgttgtggtaaagcaaatgccattttagcggtgcggtggcgtcactaaatgacgcaagttcaaacgctgacgcaatggtactgtgtataaattgatgtgaaaagcgcgtttgtgcacagtttatctgcgctttgaaatgcaaattttactcgtcgtgcgtttggtgttgctgtggctgggcggcctcagcgcggccgcgttgggcattacagaaactgccgccagcgcgcactttggtacgcgcattggctggggcaaattcgaacaagaccctaatatttattataatgaaacacaatattaatataatcgtttaataaacgctcataacatattttatttactgttacatttgaaagcaaactaatattgcgcgcaaactcgccagaccgtagttattaaacgtatccaacaatgcgccattgtgtccaaatccaatattcgtgttgtcaaactttcacagcatggtatttaatcaaaccggttttgcgcagctcgcaattcacaatgcggacgcgctccgttgaccaagacagcaaattgtgctttttcaaagcgttggggctgcggccccaagaaccgctgcgacgcgtcgcctgcagtgtcgccaacaagtgcgccgcaaagcaatacaagcggtttaaaggcgtggcggacatcaagcgcgagctcggccgcttcaatctgccgccggcgcaattcaacgaagcgctgtatttgtgccgccgacacaatgcggcgtggtgcacgacggacaactgggaccgctgcggcagcgtaaacgagcgacacgtctacgaggtggactttgacgcgcaaacaaaggcggttacggagcgattttacgtttgcgtgcagtgttttgtttaaataaattgttgtcccgaatcaaaccaatgttttcatttgtcaacctgtcgttctcgcgccgcattttggcgttcttgtccgcccactgggcgtgcgcgtcggcgagcgccttgaccgcgcgctccgcgcgcagcctgtcgccgcgaagctcgtccatcagcttgcacgcgtcgctgtagtcgccgcggcttttacccaagcggtcgtttgcttcttcgattgttcgctccaaagcagttgcttgcagttgcaaatcataattagttcttgtttgcgcctcaatttgcgcctttagacgttttagcacaagttgtaactcgtttgggccaaacgagttgtccggcgcgggctcggcttcaagcaagctgggctcaaacagcccacgagccagcgacgcggcgtccgccaatccgccaaagcgcccgtgctcgcgcacgtcggccacgctgcagcgcaacacatccaccgaattacggttcacgctgtacacgttaaagtgcgcgtttttgcggcggcacatggggcactcgacgcgcttgtctcggccgcgctgcgcaattttgcgcacgcacatgacgcacaattggtgccggcacgtgtgcagctccacaatgggcaaaatggtgattgcgtcgacgggctgcaaaaaataatttttgatttcgcccaccgagcagcaaatgtggcactgcagcctcaccgtgtccatggcaacggaattaaacaacgggcgctgcgggcgcgggcgcgggcgctgcgggtgcgggcgctgcgggcgcttgggcctccaggttgtttacggcctgcggcacgccaaacggcgcgggtaaaaagttgttggcgcgcaaaatgtcgttttgcaggttgaccagctggtagcccaaaaacaagggcacgtacatggggtattcctcgtagcggcccaaggtgcgctccaacgcgcgtgtgtcgccctcaaacttcaaaacgtttctaatctgcaagcgattgggccgcgttttaatgatgtccgagctgcgcaccgggttgtacagctcggtgtttgtcacggttgctaccaagccggtgttgttaatcacacaggtgttgcagtttcgcaggcgcaggtcttcgctgtcgatctgcagcgtttcgggcgccacggcgcgcctgattaggttgcgcaaaaacccgggcatgttgttaaacacggtgtcgccgttgcccgcctggtagttgttgtcgactacgttcgcgtcgaaaaagcgcacgtcgtcgttggccacgcgcgagcagtacgcttgcgggtctgtgagcgacagaatgttgcgcgtcgcgctgtacacgctctccacaacgctgtacgtgttgtcaatgaagttttcgttgtttttcaacgaggcgcaaatgcgattgacttccaaacggttgtcgtagatcaaatgaaaaatcagctgctcggccagcatcatgcccggcaaattgaacacggtcatgtagttggctctggtgggcaccagaatgcgctttacgcccctttctttgtgccccaccaaatgccgcgctatggtgcgcttgtactggttgtcgtcttcgtcgtaaatgggcagcaccattttggacattttgaagcgcaacttcaggtggtagtcgcagatgaaccagccgtcgtccaccgacgcgtccgacgagcatggcgacctgtacgtgacgcacgagtcgaacggttcaatcgcgccaaagatgcagtggttggtcgaccgtcgcgacgacaccccgggtgacacgagcgccattttctgcggcgatgggggccgacgttttgatagagcaagaaatctcttatacaatcaattttagccaagacctcttgtatctaattttagattcttatataaagaaacggtgcgctgcgccggcagagcgctacaccgacctgtacgacgctaacaacgtgcgcacgcgccagaccgccgacagcgcggtcagcgtgcacaaaaccaacctgcgcgacgagcggtttgtgcattggttgcgttcgagcaacgcgctggtgccgttggtgcggcgcgaaaaccgcgaaacggcggtcccgcacgaccgcgtttcgcgacacattgcgtcgctcatcgaaacgaccgtgtacaagctggacggcgtcgacgttaaattcgaacatgtgtacatgcaaagcggcccggcggaccggtacgagagcaccgcggcgcacaagattgccgcgctaaaaaccgcgctgctcggcgtggattgtgcgcgcccctcgcaaaacctgcagttgggcagcgacgccgtgctggcgcgtgttcgcctagagctggagttcgagggcgcggcgcccgccgccgccagcttggacgcgttttgcgagctggtcgtgcagatggagacccttgccgaccatcacaacatcgcgccgtgcctgccctacaccacgcttctggacagcgcgacgccgcgccggtttacgcgcgaacagcgcatcgcctacggcgcgcaggcgccggacagcacgggcgtcaaaaagtgggctttcaaactagacggcgtgcgcggccgcggcgcgttcaggcgcgggtactgcctggtgcaaacggacgacatgcagttgcacgccgcctgcataagcagccccttcggcctcaacaacgtcgtcacgtttcagtgtgaggtggtggcggacaaaatttttgtcaccgatttgctgcaagtgtttcgctacaaatacaataaccgcacgcaatacgagtgcaatctgcacgacgcgtacccaataaacgcagatgtggccgtggagtgcctcaatcggctgcactgcgctgtcggcagcgtgccatggccggggctgggcgagctgcgctttcaacagtttttcgacccgccgttggcgcccacgcactacaccacgatcccgattgacggctacattgttctcgacgagcagctgcagtacgcaaaatacaaatggttgcccaccgtcgagctggagtacgacgcgcccagcggcgcgttacactccattgacggaccgctgctcggcaaaaccgtcgtggcggatttgcagctaaaacacggggcggtgtacgagtgcgctattacggacaatgcgataaacgtgctcaagtgccggcccgatcgaatagtgccctctaaagtgtgttgagtgggtagaaggggcagtcagattggtaatgcggcacgcagccgtcggccgtgaacgagtacgcgctgtcgtcattgcacgttacttcgtgcaagggcaggctaaaatagctgcagtgcatcaccctctgacagtcccacggcaccgcgtacgtttcgcgcggcctcggccaaccgttgcacagcggtctaatgtagtcacgcagttggtcagtggttccaacactggacggaaagtacattgggtcgcctaacggcgacggcgatggcggcggcgtcggcgatggcggcggcgtcggcgatggcgtcggcgatggcgtcggcgttggtgatggcgtcggcgatggcgtcggtgttggtgatggcgtcggcgatggcgtcggcgttggtgatggcgttggtgatggcgtcggcgatggcgtcggcgttggtgatggcgtcggcgttggtgatggcgtcggcgatggcgtcggcgttggtgatggcgtcggcgatggcgtcggcgttggtgatggcgtcggcgatggcgtcggcgatggcgtcggcgttggtgatggcgttggtgatagcgtcggcgatggcgtcggcgttggtgatagcgctggcgtcggcgtcggcgatggcgtcggcgttggcgtcggcgttggcgtcggcgttggcgtcggcgtcggcgatggcgttggcgtcggcgtcggcgatggcgttggcgtcggcgtcggcgagggcaaaggtggctttgtttcgatgttttgttttaaacttgttaacagccataacgttaataaaataattattatatagtttaacaatgtaaacaaaaataccattcttaataaatttttataaattcaaagcttttttatatcgaacccaagtcatgcgttcctggtggagaggaggtttttggtttcgctgaatccatttgtagtcgtttatgtgattgtgaaacgtcatgcttacataggccatcaaatttctcattagtacgtttgccgccgtagtcgagtcggcgtgctcaagcgtgtccgccaatctggcccgtttcgtcggcggcccctccagatcctgagtgtcttgccgcgcgttctcaatcgtttcttcgcagtaggattcgctgaacgttatgggcgcgccgtagcgctccttttccagcgccacgtcaatgcgctcaatgtgatagataatgtagcctttcacgttcatgtagtgatcgcggcacatggcgcattgcaaaataaaaaaaatattgtaaaatagcactttcatggtttttaattgctgcgccacaaaatccagactgcttttttcgcgcgtagccaccatgtcgtcgataatcaagctcaaaaagtggatcgtgtcccaaattgtagtgaacgtgtacataaaacttttgggctggcacgatcgcagattcagttcggcggtgttgtccataaactccacgcgaaattgctgcaggtcaatatcggggggcgcgctggcggcccactcaatgagctgctgcacttcgtatttttgcacgtccttgtatttgatcaggcacgcaaaatggtataaataagtcgcttgtaaagacaacagcctggtcaggtgcgccgatttggacgcgcgcaacaggtcaattagacgaaaggcgtacaacaagtagctgtctttgtacctcgaaaacaagggcgtcagcgggatcatggcggttaaggaggtgcggctgtatttgtgtccggtgccgccgtcggtcgcgctgagcgtcggtgacgcggacgccgacgagccgatgatctactttgaaaatatcacagagtgtctcacggacgcgtcgtgcgacaagctggcgtgtttcgccgagctcaaacaggaacaggccttattcatgaaaaaactgtacaagcacatggtgctcaaaagcgacggcgcctacaacaagcaccacgttttgtttgacctgatggtcatgtataagacgtatgtgcaactggcggacgagtccgcgttcgggagcaacgtgctgcactactgcgaacagtttatcacgggcgcgtttgaggtgttcgggctcggcagccgcgtcgcggtgctagtgccgcccggttgggaaaacgataatttaagtgtacttttgaaacatttgcacggcctacacctgatagcaatcgacatcgtgcaatagcaacatgtggggcgccctgatcttgctgattttgctggtttttttattctacttgtggtacaacggcaaacttaatctcaactccctcaccgaatcttcgcccagcctcgcgcaaagcagcgattcggtgcaggtggacccgcaaacggagcagctcaacgtgaaactcggcaacaacaagatgacgtacatgcgagtggcgcacggcgacaacaaggtcagccaggtgtacgtggcggagaagcccatgtccatggacgacattgaaaagcagggcaacgcgcgcgttggtgccaactctttgttcattggcaccgtttacgaccaaggcgtgcgctcgcccaacgcgccgggcgcgtccaacgacgtgaccgtcacgcgcacgaccgccaattttgacgtgaaggagtacaaaaacatgtttatagtcgtcaaaggactgccgccggctaaaatgaccaaggaggacaacatgttgtgcttcaccgtcgacggcctgcacgtgtgtctggtggacgccaacgcagcgccgctgtccgagcgcgtatttgcgcgactgccgccgtccgcttgcacgctagtgtacacgcgcaattcggcggcgcagcagcttttgttggagaacgggtttaccgtggtgaacgctgagcacacggcgttcctcaaaaaccacaagtcgtacagggagttgtaaatgaaacaaaaataatggctattctttttattgtgttacgcactagcatttaaactggggcacgttaatgtttatgtccaacttgttgagcgccattgtcaaattattaaacttgcaaccgcgttcgtcgtagttgtttttgaacttgtcttttatttgttgcaacaaaatcttttcgtcaaacacaaaactcctggcggtgccggcgttgatgttcttggccgcgttgtactgcgtgaacgaggggtgcaaaaacgatttgaggtgaagcgtcgcgtatccaatcatctcctgcattttttcctcagtgacaaacgtgttggcgctgcgcggcgccgtcttgatgttcaatatgtatatgaccgcgtacatggggctgttgttgacgctgaggcgcgtcagattgtgctggtgcacggggtcgctgtctaacagcgtcttgtacggcaccaagcccgtttgcggctcgcgctggtagcgcacgacgtgcgccaaaaacacgcgcaccgagtccttgagcgcgtccaccaccatgggctcctgcgggtactgcttggtcaaaatgtggtggtacacggagcccgaaaaccgcacgtgcggcaaaaacttgtggtccgtgtacacaatcagaaaccggttctgaacgccgtcgtcgtagtcgtccacgtacagtgggttgttgttcacgatcaacattttgtagttggcctcgtatttgagcagcccctggtacttgcggctctttgagtcgcttttgcttgagtcggcgtgctttttgaaaaaactctcgctgcactttttcagctcgttaattgtgtacacctccgaattgagattgctcacttccttgtcgctagtttccttggacgcgcccgtgtgcgtgtcgtcgtcaaacttgtgcatcagcaccaaaaaatcgagcagctcgaaaaacgtcgacttgccagacagcggtacgcccggcaggtacaccgctttgcgcccgtagtccgtgggcaccgacaggctggccgcaaagtgcattagcatgtacgagctggcgtggttaaagttggtgtagcgcttgaagtacaggtagccctccacaacctgcgtcaggtacgccacggggtagttttgcacgtccatttttgacaaaatcacgcgcaggtagaagcgcgtcaaccagctggacagcgtgtccgagtcgcgcgctagaataatcttgtcccaccacaggtttttgtacttgtgcaaaatgttggccgcgttggcgtagtgcgcataaaacttggccacggcgttgtcggcggcgggcgccgcggcgggctcgtttgccacggcgtgttgaaggtaggccaaaaacgcgtcgtggttgcacacgtcggccatcagcgtgtccacaaattcgattttgtgcaaatcgcggtgcaggatcgcggcaattttaatgtgttccttcgtaaaaaaatgcgcatgttgcgcgaccagtttgctggtcgttacaatcaaagcggtgttaatgtacaacttgttggtggcaaaaatcaacatccacattagctgcgtcagttcggggtcgccgacaaacaaatcgaagatcaggcacgttttgagcgcctggcgatttattttaattttttggacgcacctgcacttgcgctcttggacgctggcgcggcacgcgccgcacttgaaattgtgcacaatgtcctccactcgaagcttgttcacgtacaacgccaacgtcacaagactgtcgtcgtccaaattccacagttcccggaacaggtcgttgagccgcagtcgcgcgtccagtttgcacggcgcgcagtcgcccagcaagttgaccgtgcccaaattcaccttcaccatcttcacgtcccggcacagtttggcgatgtggtacgtgcgcagaatgtcgcgctcttcggcgctggtggcgagcatgtgcgcaaacaccgcttcgggcaggtagggcgggtcgtcgggccgcttgaacgtgcccggcatggtggtgcccagcaagaaggggcagttggaatagaaatcgtccgtgaccacgttgtacacgccatatttggtgtggtacatgtacttccaattgttgaacttaatgttttgcaacttgtacgggttggtctccaccagcttgtacagctcgtcgtctttcttgacaatctggtagtgctcgccgttaaacacgagcgttacctgcgtgaccacattttccacctttatgaaaaacgcctcgcccaacgcctttggcggcaccttgcactccatcgcgtttttatagttgaaggcccatgggtcgtcgcactcgtgcgcgtcgctgcttgtcagctttagataaatgaagtagtgagcgccgtaataggagcccaacagggtgtacgggttaacgcccttgaaacagtgccagtggtcgcacaagctgttaaacgtggccacgccgcgcgtcgtgaacggctcgcacttgacgagcgccgtcgccagcgcgtccgagtcgttgccaaacagagtttcgcaaaccagctcaaaaaacaacttcatgtcggtttcgcgaaagctcttcttgtcccgctttgttatctgcttccacacgttaaacagcaaaaaatgaaagtttttaaacccgctttctttaaagtacgcctgcagcaaatcggggtcgtcggatcggttaaactccgccatgacctttaccatgccttcgcgcactttcaccaacgccgcgtctatttcgctttgaataacctctgcgttctcgctgctggcggaaagaatggtcgtcacggtgggcgcgcggaacgcgcgctcgacgggcggcgccagaaccgcgccgtcgtgggcaaactggcgcagtttggtcagattcacgtcgattatgtgccggtacttgggcgtggtgacgcactcttccaaattgatgttgtcccggatgacctcaaaaaggtttttgttggaattgaccagattggcaatcattttgcacgtggctgtggcgccgttggccatttttatttcgaacaaactttccaccgctttgccgctttccgcaacctttttctcaaaatcaaacttgccgttcacgaacaacttgacgggcggcgcttcgttggtgctcaagttcatttcgatgttcaaaaacgttcgcgggttgaacacaaacaagtcgacgggccccaatcgccggttgtgtataatgggcaccgtcgattccacaacgatgccaaactccacgtacaagtacagctgccagccggtaaaggacacggcttgcgacgcgggccagttgggccagtaacagtagtcgccggcctgcacgcacatgttggtgtgctccgggttgtcgctcttgaaaaaccggtctagcttgaggtagtttttgatttcgtcatagtgtcttttcaataaaaacggcttgacaaacacgcaaaagtcgttgttttccagcaccaacgaatgccccgcaaaagacacgcgcgccgccggcggcgcctcctcctcgtcatcgtgccgcgcggcgcgctggtgccgcgcgcacgcgccggccgcgtcgctcctgattgtgtttaagaaccgccgaaagttgctgacgtgttccagcagcctgcgcgtgcccgtgtcggtgtctataattatcagccggttcgcgtcccgcaaactgttcactgcgtattcctcgtcgcccgtcacgtccctgaacaaacgcgacaaaatgctgttcatgatggcagcgatcgcgctcgcggtgttgctgtttatgtacgtcgcggtggcgctgcgagaccaccatccattcttaaacagggttcaggcgctgctgcgcgatttcgacaacacgctgctgtacgggacgcacgtgcggatctacgacctcagcacacccgcgcgcaccgagcgactgtttattattgcgcccgaaaacgtagtgctgtacaattttgacaaaacgctttattactacctggactcggccaacgtgttctgccccaacgagtacaccgtggccaaattcacgggcgcgaccatccgcacggtcaacgacacgggagtgtactccacggcgtgcacggtcgtcggcagcttgacgctaattgaacactttgtcgggctcaagaacaactcgccggaccacacgctcgtgctggacgtcgccgagcagattcagtttacaatcatggacgtcatcaactatttgatctacaacgggtacgtggacatcgcggcgggctgagcggaatgctggccgggggctttgcggcctacatactgggccgcaccagcgactacggcgacgtggacctgttttccgaggacgcccacctcgagtccgctttgctggccgacgggcggtacgtgcgcaaccgccgcgggcagtacggcgagtacacggggtattgctccaacaagcaacggatgcgctgcgttctgaaccacaaggtcttaaatttgcaaatcgtgctcatccacaacacgacgccctggcgcggcgcgcaattctactacgagctgctgaagagcttcgacatgcaggtgtgccgagtggggctatttctgcacaacgcggcgaccgtcgctgagtcgctgagctacatgtgcattaacaagtacattggcacgattaaacaaagttcgcggcggcaggaacggtaccgccgccgcatgttgcaccacggcccgccgcccacgctgcaggaactgtgccagtttcaggtgcaagtgtctgaccccgcgtacaaaacgtttagtttagacgaggcctattactgcgttgccgattgtgaagaggttgaataataaacacagaatttaattaaatggttttatttgaaacgtacaagctgtcgtactcggcgaggttgtcgagaatttcgtcctggtagcgccgccagtcgcgcaggggcacggggcagcgctttacgcgcacgtagtagtcgtacgcaaagttgttgctggggaggtcgtcgaccagcgtgatcgacttaaaataattgacgcctttgtcggccaaaattttaatcaccaccttgggcgacttgggcagttcggcgcccgactctgcgtgcatgtcaaacgaaaagttggaggaaacgtagcggctctgcatttgcaagtccgtcgtctcggtcgtcgcggcgggcgcgtcctcggcgaccgacccctcgctgatgattgcgtcgaaatacggcgtcagctggaccgcgcgcagcgagtgcgccacgtgatcgcggctgccgtaggaccacagcaccaacacgcagcccaggtcgcgcaattcgctcaaatcgtcgtaaatttgcgggtcgcggatttgcacgtcttcctgctccgtgataagcgtgctgtcgaggtcgaacacgaccacgtgtggaaactcccacaccagcgactggctgcgcagcagcggcacctgaaactcaaagagcgtgtaccactctttaaggcacgcgtacatggccggtttgtgttgaagcacgcacacgtggcccagcaccggcgtcttaaacgcggtcttgacgtggtgccgcacgctacacatgtcgtcggcggcgctaaacacttgcaaacagtatcgcgggttggtcgccatggcgccgcaaaactgcgcgctgccgttcaattgaagcaacacgtattcaaagtactcgtatttttggaaccccaagtacttgaggtccgcgtattcggccaaaaccaaaacatggcccttgtaaaaggcgtcgcgcagtcgcaaacacgcccacttgcatttcatggcgaacaatggacgccgcgcgccttattcacggtgttcggcgcgttccgcgccagcaaggactacgcaaagctgatagagtttctcaccaacaattttgcgtgctacgtgaaaaacaaaacgttcaactttgcgggcaccggccacctgtttcactcgttgtacgcgtttgtgcccaacgtcagcgagttggtgaaggagcgaaagcaaatccggcttcaaattgactgtgtgatgcggctgtttaaaaacaccacaaacgattttaaaatgtacgtggagctgtttgcttttatagacgcgcacgggggcgcggagtgcccctgcctacttttgcagcaaagcaagctgaacgccgtaagctttgtcgagaacctgaactgcaagctgttcgacataaaaccgccaaagtttaaaaaggagccgttcgattccattttgtccaaatactcgctaaactacaaggcgctgtgcttcaaaaaaaaggaaaagtgcacagtcgggtgcgttaccaagcggcagaaaaaaatgaaacggcggcaattgttaagcgatagagtcatttatttgcacaacaaaaacgacgtcttggacgaacgcacgttgctacacggtccgagcggaacgagccttgcgccctgccttcataggtacgccactgttgagcggcaaacgcgcgccggcgacgaaatggtttcctttatccgatactgcgagctctgccagatgcgcgcctagtagcggcgcctgcggtacccggagcggcgagtggcggagcggctgcgccggtaggtgcgcggcctgccggggcggcgtcggtagccggagcttcggcggcggcgcgtataggtgccatcggcggatcgggagcggcggcggcggtagaccatgatgcgcgtgttgtcgatgtagctttagtttttaccttatattattttcttgcgcttggcggtcgtgcccaaataaatgtccagctcatcactgtcctcggccgttttatttgcgtgctttttgatgctctcggcacctttgaaaattctattgtagtcctcgatgttgaacttgcaattggccaccgcgtagttttccatggtggtgtaaaacatggagttggccgcgttgtaatacattctggatagcgggtacgggtccaggtgcttcaacaacctgttgataaactcggggtcgtcgcaaaacggaatctcgctgccgctcgcaacgtactgctgcggctgcaacttttggatgttgtcgccgcgctccaccagcagctcctccaacgtggtgcgctcatcgcggctcaccgtctcgccctgcagcagcacaaccttggcgtagcgcagcacggggctggcgaagcaacgcgcgaacgaactgcgcatcacatccaccgtggtcatgtcaattggagtggtgggcatttccagcagcgtgcgcaacgtgtgcaacaacgtgctaacttgcgcctccgtcaactgcgggcggcacgtaaaatcgtccatcgcggtgtccaacagtttgaacaactgatggtagttttccgaacgctgcaaaaatatcatggtcatcaccacgtcgcgcaccttgaactcgctcgacgtggtggtgttgagcgagtagtactggatgagccgacgggccgccgcgcggtagcgccgcatgtcgacgagcgcgggttccgcgctcggcgcggacacgagcgccccgaacacggtttgcgcgggcggcgcgggcgcgggcattgccgcgggcgctctcgccccgcccgccgcgaacgccgacgccgtggcggcgttcgcgttggcaaacgccgtttgcgatttgcgcgccaccgtaaccaaaaaggccattaacgcggacgtgtccacatccacgtcggacaccgtgtcgctgcacatgcgcagcagctgcggccaaatttccatctgcatgttttcgtctattagacggcgcaagctgtctatgcggatgtgcacgtcaatcacgctcatggcggcggcttatgagatgttgaccacctccagctggttggtgtacacgtcgttcaaaaatttcaacacgttcaccgtgtcctcgcgatttagcttaattgtgggcgcgccggcctgcagcgactcgaccagcttgcgcgccgcgatcgactggttgcccagcgtggtcaaactggcaattttgttttcggaggcgtctttgacgatgaacgacgccgccgtttctgcgccgttcatgttgtgaagcatttccgcggcggccagctgcgtgggcggccgatcctgctgttgtgcacggcgagttcgccgcagcggcggctctgcgctatcgcctatcgaagcaatcatggttcagatcgaggagcaacgaaatctcgttgtccagttggtagtcgacaatgatgcgccttataaacgtttcgggcacgattttctcgaaaatcaacacgttcattatttccacggtaatctttttgagcttttccacaacgaccgccacgtccttgtccgagtagcgtttgaatatgtaacggcacacgttgagcatttccagctcggcggcggagcacccttcgtcgcgcgagtcgttgtgttcgtctttcaaaagcccgcgcaggttttgcaagtaatggctgggcatgctctcgatgtattggcgcagaaagaaacctatcaacacggtggccgcgattttgtttacttttttgattttggtgtgctggcccattttgatcataaagttcttgaagggcattagcagctttggcgcgttggctgccgtggaggcactgttgcattgctcgttgagcatcgttagtagtcggtgacggtctttggctgacaaaagcgtgattacgcgtttacaatctttaacaagcggctcgcacgctttttgtttagtgtgcatcgaatatgctttgtcgcacagcaaattgtagaaaaactgcacaaacatttgcgtcattaagttgttttcgttgacgacgtctggctgcgaggaaaaatcggttttagagatgacgtaaatcagcagcggcatgccgaacatgggccgcaaaaaaatgtcccagccgtcttgaagccccgaatcgagcgtggtcagggcggccgacaaatagttgcacttgcacgttaggcacgaaattttgccgcccggccgacactgctcgtcgcacatgaaggcgcgcacgtcgggcaccgctatagggttgtaatatgtttttaagtactccatgatggttttaaaatgaggaacttgtttgatgaactcgtcgcgcaaaaacatgcccataatgcttttgatgccgtgtaggttttccgaatcgggctgcgcctcgaacttggccttgatcgcaactatgcatttattgaattctgtaaaaaaggttaggccctttatgtcaatcaaactgtgctggtcaaagtacttggccgtcaaaaaggttagcgagtcgatttcgcgttggtgcatttgcgcttcaaagcgcacgtgttcaaagcggtgctccagaccgtgcaccgcgttgaacctcaaattgtacaacaatttgtaagtgtgcatgttgcattcgatatagccttataatggacgagcagcattcattacgcattgccgcgctggctggcgagatcttgacgcgcgaccgcgcacaggtgaacacaatcatacacagccccgagcgcgcgctgggccaaaaattggacgccattacggcgctagtcgattcaatgcagcccggcacgccgcgcgacgctgctgtgaacgaagccgcaaacgttaccgcgcaaagcccaatgtcggaaactcaagacccgcagcgcgccaacgacaacgtgtcagataccgttgcaaatgaaaacgcgcaaaacttgttgttggagggccaagaccgcgttttgcgacatcgcgttttgcaaatcgcggtaacgtttttgcagcgcaacaagcgagtaaaagcgaacgcgaccacgttggcccagattgaggaagcgctccgaaactatgaaactgcaaaaaacagcggcgcaagcgacagtgtaatcgacgggtttcttgaacgtgccgaatctttgtttaacaccctaaaaaacatatcgctatccgagctgttggaccgcgaaagcgcagtgtttgcggacacggaaagcgctccgcggacgcaaaccgcggacaactcgccgccacctgtgagcgaacaagactttgaccggttggacattagccagctcaccgattacatcgagaacaattacagggatcagtttgatttcgacaaacacaacagtgtggaagacgtgcgcaactttgcaaaaaatctttggcgcaacaaaacgcgtgtcacgtccacgcctctgcaggaataccagatgccaccgcaaacgcccgcgcctctgcaagaccaaatgccaccgcaaacgcccgcgtacgcgacgcccgcgcagcagccaagccagccaacgcccgcgcaaacgcccgcgcagcagccaagccagccaacgcccgcgtacgttacgtctgcgcaaacgcccgcgcagcagccaagccagccaacgcccgtttccaattacagttgggaaaggcgcgtcgcgtcaatgtttgcgaatacagatttaccacaaaacgtgccgctgcccgacagctacgacacctcgtccgtcattgggcaaaaacggcgcaagcggcgcgcgccgccgctgccgccgtactcgtcagacgaagaagacgccgccccgccacgttcgccaaaacgcaaagagtcgctttcctcgtctgaagaagacgaatttgactacgagcgcgaacaaaaacgccggcgcgaggaggataaaaactttttgcgcctaaaggcgttggaactgtccaagtacgccggcgttaacgagcgcatggaaaagattgtgcgcgttaccaaggcgatgcaacaaacgtacgactactgcaattgcaaaaacacaatcagcggcacgcccgccgcggcgtcgtttattaacttgttgcggcggctgaacacctacaacctcagccacgtggaaatgacggtcaacttttacgagctcttgtaccccctcacgctgtacaacgacgagtccaaccgcattgttggctacatattcgcggcgaccaactattttcaaaattgcgccaaaaactttgggcgcatgcgcgccgagtttaacgagcacggcccgtttgcgcaaattgattcgctcgtcatgtttgtcatcaaattcaactttttgtgcgacttgcaaacgttttttggaaaaattgacggcttgccaatgttggcccagcccaacatcaagacgcacaccgtgctggtgatgcgcgacaagatcgtcaagctggcctttggcgcgctgcaatacgacaccagtctgaaaacggacaatcggcgggaccccaaacacctgcaacgactcatccagttgatgaacgccgattttaacataatgtaaacaaatgtgttagcaatttatttattacaaacagagttacgatattcggtgtacatggttttataatctttgtgatcaaagttaaaacgttttctatacaaataataaagcttgttaaacagctgttttcgtttttttttgtgtcgcaaacaaattttttgtggcaatggcgtagcacatctagaaaattaaatttttcgccgaccgcacactcttcattaagctcgttacggctggccgcctatgcgataactgcacgtgacacacagggtgtagtggccgcatggcgccgccaccatgcgcttcggctcgctcatgcaaacaatgcactcgtcgttggcttcgtcggtaaacacgcgctcaacagtaattttacaaacggtaacggcgtctggttttatgtaataatagcatttggagcggcaaattaaggaactgtctttgggcgccacggcaaaagtggcgccctcgcgccgcaaccgcttgggaaaggtgcagttggcgtcgcgccgataggcgggatcgtctatacgcacgcgcagcctgccgttcacctttacacaaatcaacttaacgtgcgccattgcacggtcgaatgtaggaccagtgtcaattatttaagacaccgttagcataaccgctggcccaatggacgccaaatacaaggtggtcgacgtggacacctttgcccgccagctaatcacggacaagtgcagcgagctgattgaaaccgaaaatctattgcctgcaaacattttgcatgttgttaaacaagcaagagacaaatactttgaagacccctcggtcaaaaactacgaatatgtcaaaaacctgtttttgcgcacaaaatacatggacgactcaattgactacaaaaattttaatcggcgcgtgttgctgattgtgttcaaatttgcgctcaaccgaggctccggctactttccctcgtacagggagctcattgaagtggccgtcaagcgcctcaacaaaatcaaccccgacctcaagagctcgccgcgcgccatgttgcagcactacaacgagtgcctggaaaacctggacaacccggtgaccgacgagcaccacctgttaacgtttggaaaagaagtggccaccaaaatgtttatcgaggcgttcgagtttagctacgccagcaacaacgaaatcaacttaactaccaacaagcgcggctcggacctgttcgacccgataccgatgcccgcgcccgcgcccgcgccttcggcgtctttgttggacaacgtcatgaacgagcgcaagcgcaagttgcaggcgtcggtcacgacaacgccgcccaaacgatgcaaattggccgaccggccggcgcagaccacacaagacacgccgcgcgcgccgcaaccggcgcctgtgcgcgcgcagcggcccctgtttacgctgtagacgcgcgcgcagaggcgtcggtgggcggcgcgtaatttcgctgcagcgcgcgttcaaactgcgcgcggcccacttgcacggcgtacgcgttggtcaaaacggccactagcaacgtaaaaaacaaaatgatcataatgacgaccaagaacccgcaaagtaccaacacaaattccttgatgagggaccggttgcgcgccacaaattgctcaagctggtccccgtcggtgggcgtggcgttgctgcggatgacctcgacgatggggttgccggcgcggccgccggtcaagcgcgacacgacgtgcgacggtgtggccatgtcttacagaaagtagttgtaccttacggcgtgcacgaccacgccgctcgtaaaaacgccgtccacggccacgcggttggcgacctgctttaggtgcgcgacgtcgtcaaattcggtgttgtcgaacgtgctggccggggccgcgtcgggcatgttgacgggcacgcagcctgcggtggtgatggccacgctgtcgtttttgcaaaaaacgcgcacgcgattttcgtgcgccgtttgcccactctttgcgttgagcgagttgagtttcacgattacaatgggcacaatttggtacggaaaaatgagctgttggaatatgcgcacaaactcgacaatggtttggctgcacttggcaatgtgcagcagcgtctgcgcgtccttgacgtactgcaggcttgcgcgattgacggtcgcgcaattggacggaatgtcgccgcgcaacagccggcgcgtgcgcgcccagttgagcttgttgtacaggctgtcgacttcttcgtgcggcaagttgattacgtagcgcgcgggcaacttgcggtattggaaaatgcaaaagatgcgcttcaggcacaaaatcttgaccatggtgggcgtttctaaattgaaacacaacaaaaacttgtcgctttccgtcaactccttgaaatgcgccagcggcagctcgcaattgatgggccgcagctcgctgtagctgagcggcggcgcgtgggcgcgcatgtccaccgatttcctggcgccggagagcaacttgcaaaccggctgcatttcgagccccgggtacgtaaactcaatggggcatgtggggttttcgtggtgcacaatcaacgtgttgcagtaaaacaggttgttggtcaacagcacgctaaacacgcgcgtttcgccggcgccaatttccgtgatgggcaccagcgggttccagtacacgatggtggcggcgcccgtttttttgggcgactggctgttgccgttgtagtcttgctcatgtttgtaaaccagcacggaccgaaaccggggaaagttgcgtttttcgacatacaacacgtccgcgtccgtgggaacgtacacgacgaggttttccgtgggccggttgccgactgccgtttgcggctccaccaagttgtacggaaacgcaaagaacctgtcgctcacgcacacctttatttgaaacgggcactccatggcggcgtacgagtaagccttatcaaataaagtatgatgaaaacacttttgatcgcaacagcggtcctaattttgctgttattggcggcgtttgcgtactttgcgaagggccacgccgcggaagacgacgttttgcagcggtgcaaagacaatggcgggttcggcaacgtttccagcgcgtactgcaacaaatttttcatgtgttttggcgaccaatatattccggcatattgcaccgcgggctttgttttcgacgaagccacgggccattgcgcaaacgccgccaccgtcgactgccggggccggccgctactttagcccgtgcacgcggaccgtgctgagcagcgcggccgggatgtagttgtactggtagaacaggttgcgccgcacgcgcgcattgttaacaattatgaacacgcaaaagtagatggcgtacaaaaatataataattaaaaaggtggcggacaagaagtacttcattgttaccttacggtaaataaaaccaagcacataactgcaaaatttattacaaacgacttttctctgacaaattttctttgttgtagtcgtgatgggcgcaaaacgggcgctcgtgcgcgcccggcgcgttttctctgcacaccaacttgcggataaacataacgttttcgtaggctgccgccggaaggttgccgctgtgcagagtggtgggcgcgagcggcttgcgcgcgttgttgtaaaagtgctgcaccgcatacgcgtccattgtgcgtaatgcaaaattgctgcactctgccgcgtttttatacttgagcgcgctgcccgccagctaaccggtgcagcagcgcgttggcgtattcgtaaacgccgccattgtcgagccaaatcgggcagcttacagcgtaacgtgccgcgccgcggtcgcatcagtaaggcgcacaatgaacgagtacacaagcacctacaggttgttcagggaattggtcagcatcaggcgcgcgcaatggaccatgattggactgtcgttagcaagcgtagcgcttgtcgtaagcttggcctgctatggcgcctccgtggttaacgagcagatgaactccatttcgcggtctgtcgccgcgcaactgcacaaccacgagcaattgcagcgccgaattgcgggcgcgctctccgcccaacaggacgccgacttcacctacccgcttgtggtgcgctccagcaacgtgatgatcaacgtcaacacttttgggcacacgagcattatcgacgccaagtatttttcagcctgtccggccagcgcgcaatacgcggcgtcactgtcccaactgtacaagctgtcgcgtccgccgctcatcagcaacgtgtttttgtttgcgggcggccacgggttgggcaaaacctacgccagttaccagctcggccgagcgctcagcaggtttgctgacacaattgtaatctccgtgcccatgaacacatttggaaacctcaacgacgcgggcgcgttaatcagccgtttagaagaggcgctgcacggcgagtgcttcatcgtgtggacgtttgacgagttggactcgtacgtggtgcaaagcctcgatgccatgcgcgacaagaccattacacagttcgccgaatacacgggttttatcaaaaacacaaaccgcgtgctcgcgtttacgatgaacaacgcggaaatgctgctgcacgactactggggggaccgcgagcgcatcgaggccaactttacccactacgagcacgttgacgacctgcgtcgggcgctcgcgttcacgcgcatggacttggacacgtttttgcaagagggacagcttagtcgactgcgctcgtttgtgggcaacaagctctttgtgtacaagccgtttacggcgcaagtcgcgcgggcgttcgctttgcaatatttggagcacgagcacgtcaacgcctctgtagacacgttgtttgtcgacgacaataaacctttttcggtaagaactgtaaagatcgcgttagacgacattgtcaataaagtgtgatgaatagccgtgtgttttaatcaaacgccccatccgccgcgtctctactaaagtttgtcagcggttcgctcccaatgtcatagtttaacaacacgttgtatatttttcgcggcgacaaacgacacacctgctgtttcagctccataaacatgcgctcgtgcacgttcattgttaaatattttaattggatgttggtggagttggtcaccaacatgagaatggcaaaatcgagcgcggccagcttgtaatcgtttgcgtagcctttgtagttgccgattacgcgcaataatttgttggcttttgcgtacttgcacgcgtagtagtacgcgcgcatggttgcgattatggtttccttggcgccggtacgcattgtgttcacaaacagcacgttgcccaatttgagttttttcttagcgtcgttcaatttgtacaagttgagcgcgctgagcgcaaagttgtcgggcaatgttgcgttgtacaaacagtacggtagcgcgttaagctctaggtactcggcgcacaactcggtctgctggctgcccgggctgttcaaatacaatttgttgtttaacgtgtagcacacttcaaagtccaagcccgcggtttggtattgcgcactgtcttgtacgctgattaggccggcgtttatcctgtctctaaagactatatacggcggttcgctgagctgcagcggcggcacaacgtgatacattacgcgcacgtttttgtccagcgagccgtctttgctccgcatcatggccaaaaagtatgccaagtagttgccaaacgcggtcgcaaacaactcgccactttcgttgtttggcaagtaccacaggttgtctcgaaatggcaaaccggcggtgtagcacagcacgcacgtcagcttcatgtgcgtcatttcaatgttgtttagagtgtcgagccgacaattgtaggtaaagtttaaaattttgttcagctccttgtcgtacttgtttccaattgcatcgccgttgggcagcatgtccaacaaacgctgtttcaattggggtttcgattcaacgttgtgggtaaagctaattttattcaagttgtcgagcaacaatttgaggcttcgtgcatcacatttttgcaaatacgggtcggcgttagcggccacgttattgagagttgtcaacaagctctgcaaccgatcgcccaaatggttaaaactaaaatagcccacgccgttgctgttgacgttggcgttcagaaactccagctcgttcaccaccattcgctggacaaacgagtacgacaccggcgtagccatgttgcgctcttatttacgtgagcgctaaccgtacacgcgccgatacaagctcgccgcgtgcgtcggtatgcacacggggacggtgcgcgccagcgccgtttggcgaaacatcaatttgtcgtaaccggcggcgcacgtgcacgcgtcggcggaaaacggcgtcgtgtccaattcgagccgcagcgcgccggcgtcgcaaaggtaaggcctcgcggcgcccgtgtcgtccaccaggtccctgtacgtgctcacacatgtttgtgagacgacaaagtcgccgccggccgcgtacacgcgcaacagccccagcgcgggatcgcattcgatcgctgagcccggagcctgcgcgtccgccaaaatgttggttgcgctgcaaaacccgttatcgcatgtcagatcgcttgccgcgctggcgatcacacagttgtctcgacattgctgacttgtcacacacggcaaccggtttaatgcgcaatctacggctcgggcgcgctgaaacgcgaagtgcatgagcggcgccgccgccgcgtgctgccgcgcgagcgcgtcttgttgcaggaaccgttgcgcaaaccgcaacgcgtaaacgtacactattgcaacgacgagcagcaaaaacagcaactgccacacggtcggcatacttagtttagcgccgcgcttgcacaagaatgtcgtgcaccgaagcaaaaatacgcgggcatgctcgaggacaaggaccggcgcatccaagagttgtacgccagcttgcttgaaatgtccgagcgcgccgtgcagtaccctgcaaaaggccaccagacgcccatgctgtgcgtggcgcgcgagtttaactgtttgcgcgccatcacgggtcaaaaggtgcacgtgactaaaatgaagcgcgagctgaccgacgcggccgagcttgtcatcgacgcgatgcggcccaacccgcaggtggacctcaacaactttgtcaaccgcgtctagtccaagtttggcgaaaaggtgcgtttgcgcaacaaacgcaaccttgtgttcaaaacgtaagatggcgccatcaaaatggcggccatgttcacgtcgttgctgggcaaaaaacaaaccgcaataagccgcgtatataacgcgcggccgcccgttgccggcagttgtcatgccgctcacggccaatgtgttatacgtgtctaacaagttagactttgtttttgatctgcaaaaatgcttcgttgttgaacaattgcaatgctacaatcgagactctttagcactggtggtgaccagtgacagtgtaagctgtccgtcggagctcgtgcacaccaaggacacatttgagcggtcgcaactggagctgttggaaaaggccgagtttagcgtgcaaattgtcgatcaccttcgactaaaaatacgccacattgtgaataaatacaacgaaacctttgccgattagcgtcaacatgaaaaccaaacaaagcctgcaggccaacaaaaatttgttaattgaaaaaacatttttaaaatcgcccaaatctttgcaaaatttggcgaaaacggcatttatcaacagcaacgggtttagagcgcggttttgggaccacgttcgcacaatgcccagcgccgtcaagctggacgttatgcgcgccttgtttgacggcgcgcgcacaattttggaaaacgacgcgctagacaactggccgcccgtgaacgaaaacgtgcttgaagccctgttgtttggcgaccgcggcggccacaatttcaccggacaagacgacgctgtggacgtcgtgcgcaagttgcgttgcgacgggtgtgggcgacaaaacggcggcagcgtcgtaaacgcttgccggcgcacattaacgagtgcgacgaatgcggcacttacattgaacacgcacggcttgacaaccacgatttgcgcgaaatcatttacaattttgataactggtgccagggctgttgtgtgcaaccgttgtttaacatacattacttggaaaactacaatcaatgtgtcaggtgcgccatggtgccggttacaacagcaactttgccgacaagttgtgtgaaaaatccacttggcgcctttgcacgccaaatacggcgtgcaatacatttataaactgatagataataaaattgtcaaaatgtaatcattgttttatttatcgtaagaaaatgtattttctgattctaattttggttttgttgttgattatggtcgcggcggcgaccgcgtacgtaaacctcattgatgtgcaccacgaagacgtgcggcccccgctgcaaatgtttgataccggcaatgtgccgctcatagagccgccgggcgaaattgtgaccgaaggcaacgcgcacgagtgccacaaagcgttgacgccgtgtgacacgcacgcggactgtaacgcgtgccgtgaggggctggccaattgccaactgtttgacgaggagacaatggtgcaaatgcgcgacgccgacggcaacgaacaaagcgccaccattcgcgcaggcgaatcgtattgcttcgcgctagaccgcgagcgcgcgcgctcgtgcaaccccggcacgggcgtgtggctgttggcgcaaaccgaaacggggtttgcgctgctgtgcagctgcctgcgacccgggttggtaacgcagctcaacatgtacgaagactgcaacgtgccggtcggctgcgcgccgcacgggcacgttgcgggcgtcggcgccgacgcccgctgcgtgttcgacgaggggtacgtgatcgactacgacgcggccaccgaaacgccgttctgccggccgcgcacggtgcgcgacgtgttgtttgacgaggcgtttttcccccgcgcgccgtgcgccgacgggcaagtgcgcctagaccaccccggcctcaacgactactatcgccgctactttcggatagaagacatttgcgtggtggacccctgttcggtggacccgatcagcgggcggcgcacgtcgggccgtttgttttaccacgccgccgacggcgtcgaggtgagcggctgcaactgcccggcggccgacggactgctgcccgtgttcaaccgccacgtcgccgactcgggcatggtgccccgcggcgaccgcactgtggccaacgcgtgcttgcatccgttcaacgtgcacatgttggcgctgcggcacgtcgactacaagtttttctgggcgcgccccgaccacgacgaggtggcggacgcggacgttgtgtttcaagcggacgagcgccagctcagccacgagcgctaccgcgcaatgctgtacccgctgctgcggttccacccggaagagacgagtttggtgtggggcgacagccgcgttttgaaaatatccgtgtcttacgacaccgtgctcaagaacgcgctgctgccgccgtccctgttccagctgttcaaacgcaaagagcgcgccacgtcggagcccgcgtgttttttccccggcgagggccgctgcattgtgcacaattcggagacgtgcattcgcagacacgccaatggacaggtgtggacggccgagacgttcaccgggtcgtggtgcgtgctcagccgcgacggcgccgccatcaaagtctggagccgcgcggaacgctatccgcgcggcgcggcgcccgccgcgctgcgcttaagggggttctttttcaacaacgaccgcgagcgcaacaccgtgcgcgtcgtaaacacgggcgacatggcgagcggcgcgcaaactgacgcgctcacgcaagtgctcgacaccttttccaactactcggtataagaggaaccggcgccgctttccgcgtgaacgctaaacatgagtatggctcaggtggtcgaggcgtgcaagctacacgccgtttttgcaaagttgggctatttatttagggccagggtttgtttggacattgcgcttgccaacttaaaacagcttcggcaacgcgtcgcaattccccaggtcgcaaatatgctggccaaaaaagaggcccaatgttgtttgttgcgggaaaaattaaacacacaaatcgacaacagaagtttaatcaagctttacaaaattgcataacttaaacccacggctagtcgaggtgcgcgcggcactgctgcagccgctcctcggcggcgttgtatacgggctgcgcagcaacgttgcgcgaagcgtcgtgtccgcgcaacttgggcgcgcccgccaagtggccaaagcgccgcaccggcggcgccagcgggtcgcgcagcgcattgttggccagcgccgcgattattagcgtgatgagaaccaggagaagtttcattgtgctctgaacccgttctacagtttgcgcgccttttatagaaaccaaattactataaaaagcgcgctgcacgtaaacgatatgagtgtatctgcgataagatacgcgcgcgtataaaaggcggcgcgcagccaatttgccgcagttgtttgtcgaatagtataagagcgcacactcgtcgcaatgaacgtgttcaaacggtgctcggggtacatcaggctgtcgaacgaaacccgggcgcggtttccctttgctgccatgtcgtacgttaacgtgacgctgtgtgcgtttggcgccgttgttgcgggctacctgtcggcggccaacacgtttgttgaattgcagtttcttcagtactggctgatgctgtcgttgtttgtcaccggcctcatcaacgcgacgctgtttctgcgtcaaggtaaaaccgaggcgcacgaaattgtctacgagctcaagatgctgcacgccatgtactttgccaacgcgctggtgaaccacggactgttggccacagagcggagcgctgttagcgcggtgctggtcgcaaacctggtgcactgttgcgcgctggttttgctgtttgtggagctgacggtgctgctggggcacgcgcttggcacctactccgactatcgctacgccaaggcgtgttacatgctggcgctgtttgtgtctgccgctgtcgcggtgatcacggtgggcgcgagcggcatgaaaagcgcgccgttgtgcgacaacttgctcgtggccgtggttctgagcatcgcgtacctgcttgtcgctattgtgtgggcggcgcgcaaggaagccgccgggcccaacctgcagcgcgtgcaagtggtgccgttcaacgacccgccgccttcgtttgcttcggtggaaatggatttattaaatgcaaaaattttaaaataaaacggttaaacttaattgtatttttattattgccctattattttacacaattctgtacacgcgtttgccatacatgtttaactcaattttgtcgtcgtctaacaaaacaaagacgacatggtcgggctgcgcgttgaactcgaacacagatgcgtcgcaaaacggcgcgtggtaaccaatgcacgcctcgtctgcgtcgacgcgtacgcgggccgggcgccggccgcggccgctgtttgcctcgtggatgagcagcgtgcgcgtcagcccccaccaattccagcggcgcgttagcacactgtccgactccgcgcgcggcgcgttaagcatgcacattgctgcggcgcgcggcacgcgttcgttaaaaaacttttgcgcggcgcttgcacaggttgagcggcacagttgtccgacgtacggccgcgccgggtcggccgcttcaatgttccagtgagcagcaaacagctcgtctgcggccaggtcgtattcgtgataacgcgtaagccggtccgggcgccgcagcgcgcggagacgcgtcgccgcgctcgctcccacaacgtctacgtgcaaatcaaacggtaggtgcgaaaggattttatctatcatttcaaaaggcagctgcggaagttttggtagcgcctggtggcacagcctacagcgtttgagtggcggctccatactaacatttgtttaaacaaattgggcgcctataaaagcggggtcgccgctgacgcaccgctaaaaatagcacgcgcctttcgagagcgttcgcacccgaaaagcagggtcgccgctgacgcaccgctaaaaatagcacgcgcttttcgagagcgttcgcacccgaaaagcagggtcgccgctgacgcaccgctaaaaatagcacgcgcctttcgagagcgttcgcacccgaaaagcagggtcgccgctgacgcaccgctaaaaatagcacgcgcttttcgagagcgttcgcacccgaaaagcagggtcgccgctgacgcaccgctaaaaatagcacgcgcttttcgagagcgttcgcacccgaaaagcagggtcgccgctgacgcaccgctaaaaatagcacgcgcttttcgagagcgttcgcacccgaaaagcagggtcgccgctgacgcaccgctaaaaatagcacgcgcctttcgagagcgttcgcacccgaaaagcagggtcgccgctgacgcaccgctaaaaatagcacgcgcctttcgagagcgttcgcacccgaaaagcagggtcgccgctgacgcgtagcacacgtttgtagagcgattagtacataaaacgcaaaattatcaatttaaaatttaatagaatacttgtgacaaattaaagctcgtctttaactctaacgcgttcgttcatagcattcaacaaatcgccgttgtcggcgtcaatctcccacgcaaacagcccgcccaagccgttttgctgcacgtaaacattcttggccaatacggagtcgacgctgtcaaaagaaatcaagtcgcccctctctttgttaaaaacgtaggccgctttagcggcggcgtcgaacctgtagatgtatttactgagttcattattaatttggcggtaatcgacgaccccgttttcccaggtgccgggcacggggccgtcggccgtgcccgagaaatatttgtcgccggcgtagcctgacacgcccgtccacccgcggccgtacatggcgacgcccacgatgagtttgtgggccgctacgccttggcccgtgagcaacttcacggcgtggtcggtggtgtacagctcgttggcgttccaactgggcgcgtacagcgtggtctggtagcccaaatccgtgttggaccacgcgcccttaaaatcgtaactcatgaggaatattttatcaaggaacctttgagccgcgtcgtacttcaccacggcaattttgtcgtagcccgaactaatcgcgctcgtcagctcgtacgtcttgttcgtttgcagctgcagttcgtccagcatggcgcgcaactctttcagcaaaacaaggtacgtgtcggcgtcgcgctcgccgttgccgagcgccgggttggcgcccttgccgcccggaaactcccaatcgatgtccaccccgtcgaaaaacttccacacctgcaaaaactctttaacggattcgacaaacacgcgccgcttgtccgcgtcgtgcatgaaatagaacgggtcggacagcgtccagccgccaatggacggcaggattttcaaatgcgggtttgccagcttggccgccatcaactggccaaagttgcctttgtagggctcgttccatgcggatacgcccttttgcggcttttgtatggcggcccacgggtcgtggatagcgaccttaaagtctgcgcggcctttgcacgagcgctgcagcgcttcaaaactgccgggaatggtcttgagcgcgtcgtttagcccgtcgccgccgcaaatcgggatgaagccgtacagcagatgggacaggttgggcagcggcactttgtccaccggaaagccgcggccgtacacgccccactctacgaaatacgcggccacggtcttgttgtgggggcggccgggcttgttgttttcgccccaagcgtactctagcggcgacaagtgcccgccgtccgtgtcggccaccctgacggtcaccggctcgctcacggagaagccgtcgtcgtcgcacagtttgacgcgcatgttaaactgtccgctcttggacacgtcgatcgtggctcgcttggcggcggcggcgcccttccacacttgattttcgttaaacaacacgtacgccatgtcgcccacgccgccgttccacacgttccacgacacgggcacgctgacgccggccttgcgctcaaccaggttttcgtaggcggtggcttcggagttcacgctgactagcgcatagttgcggtcggcccaatcgatgaccggcgtgccgggcgacgcgtgcgcgacggctagccacaaaatagttgccaaatagtgcagcattttatttatacttataagttataatcatttaatgtaacaccatgaacaaaataatgctgtgtttgctggtctgcggcgtcgtgcacgccgcgacgtacgaccttttaaaggcgccaaactatttcgaggactttttgcacaaattcaacaaaaactacagcagcgagtcggagaagctgcaccggttcaaaatattccagcacaacttggaagagataataaacaaaaaccaaaacgactccacggcccaatacgaaatcaacaaattctccgacctgtccaaagaagaggccatttccaagtacaccggtttgtcgctgcctcatcagacgcaaaatttttgcgaggtcgtaattctggaccgcccgcccgatagaggccctctcgagtttgactggcgccagttcaacaaggtgaccagtgttaaaaatcagggcgtttgcggcgcgtgctgggccttcgccaccctgggcagtttggaaagccagtttgcgatcaaatacaaccggctaattaacttgtcggaacaacagttcattgattgcgaccgtgtaaacgcgggctgcgacggcggcctgttgcacacggcattcgagtctgccatggaaatgggcggcgtgcaaatggaaagcgactacccctacgagaccgccaacggccaatgccgcatcaaccccaaccgatttgtggtcggcgttagaagctgccgccggtacattgttatgtttgaggaaaagctcaaggatctactgcgcgccgtggggcccattcccgtggcgatagacgcgtccgacattgtcaactatcgccgcggcattatgcgacaatgcgcgaaccacggcctaaaccacgcggtgctgttggtgggctacgccgtcgaaaacaacattccctactggatcctgaaaaacacatggggcacggactggggagaggatgggtattttagggtgcagcaaaacatcaacgcttgcggcatacgaaatgaactagtatcaagtgcggaaatttattaaaacacaatttatttcacaatacaattttattaagtaaagttataatgcaagtgtatatagggctacaatatagtatacatggattacaatgtgggtatacaaaagctatagtatggatataaaattattaagcacattggggttacaatataaacataatcaaccattaatagtggctggggcggttgcgcaacatgcaaaccaaaaacaggatgacgcccacaatcaacacaaaggtgaacccgtgccccagcataaatgagtagagcgtggcgttgagctcgcccttggccatgtcggcaatgtcgctaaggctggtggtgtggccgccaaacttggtgttctccatggtggaaatgaggttgcttttttgctgggcgataaacgaccagccgctggcatccttccagctttcgtggtagctggtattgccaatggtgggaatccaaaactctatgtcgtcgtcaatggccagttctttatagttgttgaaatcgatgcactgcgaggtgtccgtgttggcaacccagcggccctccttgtaaatgctgttgttgtagcagttgctcgtgtgcggcggcgggctggtgcacggcatcagcaaaaatgtgtcgtcggacaggaaagtggacgacaccgagttgttcatgaggttgccgataagccgctcgtcaactttggccaccgacacaatcaaatcgtgcatcatgttgtttagtttgttgatgtgcgcgtgcatcaactcaaggttcatgcgcagcaggtcattttcgtacatgagctcttcctgaatgtgcatcagatcgccctttgtcgccgtggcgccctcgtcatgcttgggcggcctgtcatggcgccaggtgtgcgggcgctgtttcaccacattttccgacctgcgcttgatgcatctgttaaacttgcagaaccaagtgttcttgcttaggtcaaaaatatcattgtccacaaggcaatgctcgcgtgtaacagaattgggatctgctttgtcgtctttaatgagcaagcaagctaccttttcagtgcgtcggctgaaggtggatttctgcttcaaaatcatactgaccccgtcgcggtgcagcaccttgttctccgtgacgttgatactagtgccgttgatgtccaaaatggtgaccttgcagtcgtcggtgtcgtcgtcgcactcaaggcgcgtgtacatcttggcggtggacacgccgcagcgccaagagcggttgcacgtgtggtgcgcaaagtggttgttgttctgccgcttcaccagctccttgccggccacccacacaccgcgcccgtccatgtttctaaagcaactctcgctgtcgctgccccactggtcgatgagctcctcgcccacttcacactgctggcggataccccacatcagcaggtcttccttggccacgtcaagcgtcttcatggtttcctcgacgcggctgttggggtccagcgagccgccgttgtatgcgtacgcctggtagtagcccttgtagccaataacaacattctggtccaggtccgtctccacaatctcaatttccacatctttctgcagcgtctccttgggcgccgcaatgggcaggctcttgatgcgccatggccccgacttcatctgggcgttgcagtgctcggcgggcgccgagaaccgaacacaaagcaaaataaatacaacaattctcaccatcttgtaggtcttgtagtgttcctgtgaagagcacagtgcaactgatttaccagaacactgtaggcccttatatacccatgcttatcaacgcgttgggtgcccacgtgactttatcaacgtacactcgggtgacccaatcaacgtgcgccttatcttgcgataatttatatcttatcttcgcgataaccaacagtataaatacgataacttgtttggcaacatgttgtatttgacggatttgcaacgcgcggcactttaggtacgttttaaaatattttacattaatttttaataattatttaattatttatgtgttaacatcgcattaaaattaaatatctgtttggacgtaaaattagactagattaaattagattagattgtacattgattagattagattaaatttgatagaangattagattaaataaaatataatcaatttattgcgtttgtttgtgtgtttgtttgtgtgtttgtttgtgtgtttgtttgtgcgtttgtttgtgtgtttgtttgtgtgtttgtttgtgtgtttgtttgtgtgtttgtttgtgcgtttgtttgtgcgtttgtttgtgtgtttgtttgtgtgtttgtttgtgcgtttgtttgtgcgtttgtttgtgtgtttgtttgtgtgtttgtttgtgcgtttgtttgtgcgtttgtttgtgcgtttgtttgtgtgtttgtttgtgtgtttgtttgtgcgtttgtttgtgcgtttgtttgtgcggtgttcgtgcggtgttcgtgcgtttgttgtgcgttgtttgtgcggtgttcgtgcgtttgttgtgcgttgtttgtgtggtgttcgtgcgtttgttgtgcgttgtttgtgtggtgttcgtgcgtttgttgtgcgttgttcgtgcgtttgttgtgcgttgtttgtgcggtgttcgtgcgtttgttgtgcgttgtttgtgtggtgttcgtgcgtttgtngtgcgttgttcgtgcgtttgttgtgcgttgttcgtgcgtttgttgtgcgttgttcgtgcgtttgtttgtgtgtgtgtgtgtgtgtgtgtgtgtgtgtgtgtgtgtgtgtgtgtgtgtgtgtgtgtgtgtgtgtgtgtgtgtgtgtgtgtgtgtgtgtgtgtgtgtgtgtgtgtgtgtgtgtgtgtgtgtgtgtgtgtgtgtgtgtgtgtgtgtgtgtgtgtgtgtgtgtgtgtgtgtgtgtgtgtgctttacaaatatatgttgtttttatttatgtaattatatcaaattttgttaaagttaacaaaacttaatactttctgccgccctaatgtaagacggacattgacatggcgaacgccgattcgctcgacgcccgcgcgttcagttacgcccccgacgccagctttgaagtgattataatcacaaacgcgcccaacgaccacgacgggtatctggagctgaacgccgcggcacgcttgttggcgccgtttcaaaaaaacatatccgccctatggacaagcgcggcgccgtcgcacaagcttgttagaaacaacaaaaactatctgcacgtttttgggctgtttaaatatttgcaaaactacaatttcaacgctaaaccgcacccgcccgaatactacactgtgaaatcggtaatttgcgaccttatagcgggcgcgcagggcaaaacgtttgacccgctgtgtgagatcaagacgcaactgtgcgccattcaagaaagcctgaacgaggcaatagtgacgttgaacagccacgcgaccgccgagcccgcgcccggtgcgccttgcgacgcgcgcgagttggtcgaaacgctgcattcggaatacagccaaaagctgacgtttgctaccgacaccattctggacaacgtgaaaagcatcaaggacctggtgtgcctcaataagtgaaaattttagccatgaatttttgggcggcttttagcgcgtgcttggtggggtacctggtctactcgggccgcttgaacggcgaactgcaggagatcaaatctattctaataatagcgtacgaggcggcggacaagcgttacaggggcgtgatcgacgaaattgagtcgctcaaaacggacacgtttatgatgttgtcgaacttgcaaaacaacacaattcgcacgtgggacgccgttgcgaaaaacggcaaaaaaattgccaatttggacgagcgcgtcaacgggctgctggccaagcacgcggtgcccgcgctcgtgagataagttattatcaaaactttggctgcagctacaatatcacacaatatgacgcccaacaacaacgtaatgttcgacgacgcgtcggtgatgtggatcgacgccgactacatctaccaaaactccaaaatgccgctgtccacgttccaacagctgctcttctccattccgtccaagcatcgcaaaatgatcaacgacatcggcaacccggcgtgcaacccgccgtcgtgctcctttccgcccagcaacagcacggtcaagtacatggtggacatttacggcgcggcggtgctggcgctgcgctgcccgtcgctgttctccgaccagctgctaaccacgtttactgctaacaactacttgagctactgcaaccgccaacggccgtgcccgcagccgccgtgcccgcagccgcccttcgactgcgcgcaaacccaaatcctggacgcgttggaaaaactggcgcgccagagcgacctggtcgtgaacagcctcaaccagatctcactgaaccaatccaaccagtttttggaactgtccaacacgctgaacacggtgcgcgcccaaaacgcgcagatcttggcggcgctggaaaccaccaaagacgcaatcttgacgcgcctcaacgcgttggtggacgacattaaagcggcgctgcccgaccaatccgcccaactgcaagaattggccgacaagctgctggacgcaatcaactcggtcgcgcaaacgcttcgcggcgaaatgaacaacaccaattcgattctaaccaatttggcgtccagcatcaccaacatcaacagcacgttgaacaacttgctggccgccattgagggtataggcggcgacggcggcggtcttggcgacgcagataggcaagcgctaaacgaggtgctcagcctggtcaccgaaataagaaacattttgatgggcaccgctcgcaagtagcatgcccagagacacgaaaccgtacagccggccggccaacgcgccgcgcccgggcgttaaaaccgagcgctcaaaccagtttaaagcggcgtcaaccaaatacggcaaacgcgtcaacgacgcgaacaaggaaacgcgccccgtggcgttcgtggacatcaagctcaaccaccgcgccacgcccgaaatggagcaacggatgcaggccgtgtacgcgcggcaaaagccgtccatattcaacaaatccgccgtagcagagttcattaaaaatcgcacgtttgtggtggcgtttgcgcaccccacgtacacgatacagtttaacaaaattcccaccgtcgaccagctgcgtgtctattgttccaacattaacaaggacttgttgttcaaagataaaaaccaacaaatgcgaaacgcgctgcccaacgcggcgtcatttcgcgtgcaaattaacgacgagccgctgtttaaggtgcaaaccgtcgtgtacgacaaagaatccgcccaattggtgttgacgataaggtttttgcccagacaaacaatggagctgctgccgatgaaaaagtgcgttgtatatctgaacatattgtcgaacgcgtctgtggattgggcagtgccggcggatttgctgcgcgcgtttgccaagctggcgctggcgccgcccatccccgcgccgcagaacgtttaacgccccgcttagccatgcacgcgccgctcaccgcggagcagcgcgacgtgtacgacaagtacaagtttgccacgtacgcgcggtcggtggcgttgacgcgcgcgcagctcgaccagtggcgcgacaacaaggttatcgttccggaacccgtgtcgcgcgcagagacgctgcgcgtggaggccgccacgcgcggccagagcaagaacgcgctgtggaacctgctgcggctggaccgcagcaccgcgtcgcgctcgtcgggcggcgtcgcactgcgctcgtccgcgctggcgtttggcaacgcgcaagagaaccggctaaagttggccaacggagagctgttcgaacggctgggccggctggccgcggagcgcgcgggctgccccgtcgccgagacggtgctggactgcggcatgtttattagcgcgtttgggctgcactcggcgtcgcccgacgcctatttcgctatggccgacggctcgtgcgtgcccgtggagatcaagtgcccgttcaactaccgcgacaccacggtggaccaaatgcgcttggagctgggtaaggccaaccgcaagtaccgcgtcaagcacacggcgctgctcgtcaacaaggcgggccccgcgcaatttgaggtggtcaagacgcacgaccactatcggcaaatgcaacggcagatgtacgtgatgcgcaacgcgcccgtgtgtttttacgtggtgcggtttaaacacaacctggtggcgctggccgtgccgcgcgacgacgatttttgccgaaaagaagcggccgcggagggcgccgcgttcgtggctttcgcaacggagaacgcggggcgcgtgcagtttaagcgcggcgaccgccgccgcgcgtcttttgcccaaaacgccgccgaccacggatacaacgccgcgcaggtggacgcgctggtgcgccgcggactgtatttgtcgtacgggcagttgcgctgcgggcattgcgacgcgtttgcgctggacggcccgcgggcgtttgagctggccatggcgcgcccacacgaacaatgcgacgggctggcgctgcaggagcacgagttcgacaatgttgcgtttctcgatttcaccaaacgctacaccagtttggtcgacaagcgctgcgacgacgcccgcgcactgcgcgtcgacggcttctacgtggacgacgccggcgccgtgaaaaccttttgttgcggcgtgcacggcagcaatgcgtcacggcgccaccttcccacgtgttcgtattatttagcaatgggtgtaaataaaatacaaaataatatgtgatttatttattggtaataattaaaaactgtttgcacaaacttgatttttatttcggcaagaaccattcgtccatgtatttgtttgacacgttcgttttgcattcaaccggtttgcacgcgtcgctgttttgcgcgcacgcaatcacacatatttgtcacatcgctatttaaaaggaaacgcggtcgcaaaagctcaaacgttatttgaaaccggcgcgcaatgtacataaagatggaggttgaatttgacgaagacacgggcgcccttcaaatcggcggacaagaggtgtttgtaatggtgttcgagcccggtcaagaggtttttgacaaaagcttggaccagcaccaccagttccccggcgtggccacaagcgtcgtgtttccgcagctgtccattggcacgaaggtggacgtgttcacctcgagcggcggattcggggccactgaccaccattgtttcaattaccacgtttgcaacaaacggtttgtgtttggtagcgttccagcgctggaaattcccgccgacgtgcgcgaacacctgcgaattggggcgcccatcacgtgcgccgaccgactggtgtcgctggtgacggcggtgcacgcggccgacggcgcctggctgctccgcgtgacggctgcgcgagccggccaggtgtctggccacgcacgtcagcaacggcgaggcgccggccggaccgtgcgcgccggccgctccgtgtacgggccggtgcagctgccgtacgagcagctaaaagcgcacgcgtttcgcaaacggcgcccgcgccgcgacgcggccgagtcttgcgcgctgttttacaacgactccgaggtgcgcatcactttcaacaagggcgagtttgaactaatgcattggcggctgccgggccctcttgtaagccacggttttaaataagcactattataaaatattaatatatttaccaaactgactgcaatatcatcatgtccaagcccagcattttgacgcaaatcctagacgccgtaagggccgttgacagcaaggtcactgcgctgcaaacccaagttgaccagctggtcgaggattccaaaaccctagaagcgctcaccgatcaactcggtgagcttgacaataaagtcagcgatattcaatcaatgctgagtgtcgaggaggagctgcccgagccgccagcaccagcgcccgagcctgagctccccgagatccccgacgttcccggccttcgccgcagtcgcaagcagtaatcaaaacagcaaatcgacggttttgaaatactcgtacggctctttgaccaagtaataaaatgcaagcatcaaaaatattgcaaaatacacaaaaaacgtaagttccttgtgcgcaataaaggccgcaagggccaccgctgtatttgtcaaaaataaacccgctatcaccccattcaacttgttgttatttttgttcattgccaacaacgtgttttgcctgtaagtgtattgcataaactcgagacgtgtgtacagcgagctgctggccagcgcttggcccacgagcgtggcctcgtcgaaatctttgatctcgtcactttcgtccaacgccagcatctgcccgtccgagttcacctcgagcgcggccacataatcgagcaaatggaatagcgactggaacgtggcgtcgtcgtccgtttctacaatgtccgcaaaaaactcgggcaaaaactcaataatttcgcgggaagtgttcgagtccagcgtttcaaagtaggcggttaggaacgtgcgcgacaaatcgtcgggaaactcgcgcggaaacatgttgttgtacccaaaggggtcccacagcgccaacaccaaatccgccagcgtaaataaaatgagcacaatgcccactacagagctggctttgatggcgacgcgcgtcagcgccttagccgccgtggtgagcgttttgatggcaatcctgttcatggagtgcaccagcgccgccttgtacgtttcgcccagcagccgcaccgtgacgcgctgcgacgtgcccaccagcatgcgtttgagcgccggaatcagcgccgtgttaatttttttgagcatcgctttaaacgccgtcaggagcatgtcgaacccaatgtcggtggcgatgccaaacacgagcgcgtactcttcaaggaacgaggcgacgattgcctccaggtcgtcgtcgctcattgcccggtcagcggcgcgcgattcgcgcgccacgcggaccgcgcctcgcgccgagtacgcaatgggagttttggtgaagcccgtttcggcggtgtacgacaattgcattagcacgccgttggcgtccatgccgagctgctgcaaagtcggcgcttccgaaaattgtttttcaaaatcccaatcaacggcgcggtcgcgcacggcgcgccattgggccagcacggcgttcgagtcggcggcgggccgcggcggcaagagcggcgacggcgccgcgtaatcaaagtcgcgcagctccgaaaaaatgttgttggccaacattttaaaggtcacgtagatggtgtcgcccagcacaaagccgatgagcgactcccaccagcgaaacgagcagccgccgttaatgaggtcgcgcccgaagcggcggcagtacgcctcgttgaactcgcccttaaagcgctctgggaacagcgggtcggggtcgggccgcacgttgaacgcgggcacgtcgtccacgcccatgatggtgtgttcctcggtgcgcaggtaggggctgttgaagtacattttagaagtggagtcgaccaacacacattggttgttgggcgtgtacgtaaactcggccgactgcacctcgttttcggcgccctcgcgcatggcggccgcgcggtccagatggtagcacgcgggctgcgcgtacgccacgctagtttccgacgtctgcgtgtacgcaaacggcgtttggctggacacgacgccggtctcgtgaaagggaaagcagctcatgctgtcgcagccgcgtcggctaaacgccagcttcaccgccagcgcgcgattgcgcaagttgggcggtacgtaatagtcgtcgtcgctggacgcgggccgcagcgtgtaatcgatgagaatgtgcggcagccgctcgcgccaacggttaataaactcgagcctgtgcatgtgccccgcgtaacggctcgcgttggtcagatctaccgcggtcagcacggccattttgttgcttattttcaaatcgttgttgtttaacgtgtgatagtttgtaataaaaatcaaatggtaaaaattatatattgttaatacatgcggtgcaaacagtataccctcccaaagtaggattaaacccattgccgtcactgttttcggcgacatctgcttcaacgtcgttttcgtacactatgcgagaaaaacaagaaatgcacccaaaatccaaaaaattcgttgaaaatcttgaaccgcttcggcgtgttctatttttagcgctcgcgaacggcgtgtgctatttttggcggtgcgtcagcggcgaccgtgcttttcgggtgccaacgctctcgaacggcgtgtgctatttttggcggtgcgtcagcgacgaccgtgcttttcgggtgcgaacgctctcgaaagcgcgtgctatttttggcggtgcgtcagcgacgacagataatttaacataatttgatatataaataacttgcggctttaaactggccattaagcaacgtgaatgcacaatggcgaccgctttttattattcgcaagaatacatgtacgtcagcacaatcagcgacatcgcggcgccgctgcgcgtacgcatacaaccaggggcgtacacgtgcgcccgcgtagcgaatcggcggggttttcagttttcacaaactcactcgacgctcgcaattggaaacatggtgaagctttacgcggcgcgcagtcacgacgccgggctgtcaaacacgtattacggcggggagatacgcgacaaaaatttggtcggcctcatttgcgacaattttttaaaagacgtgcccgaccgcgtgcaataccgtttgttttgtcaagaaacggtcgtcgacgccagagtggaccacagcaatttgtacgactcgtttgaactgattgagcgacagttgcagcaaaaatacgagggcgccgacgtggcggcgcattttcgagaacacgggttttgcgagtacaacaacctgcccattttgatgtttttaaccacagttgttgcagaaacggattttgacaagttggggtttgtggccaacgaacggtttggcggcgacgaacaccgcacctaccgcgttgagctagcgggcgcggccattggcgtccttgttcactccaaaaagttttatagcatgtatggcgaccaaatggggttggcggcctattccacagatgggctacatgtgcacgcgtttgccaattttgagcccaaaacgcaacaagagtgggataaaattgatgcgtgcatttactaagtaaaatttactaataatagcatattgtctaattgaacaacaacatgggagttaaaagcgcgttgtttattatggcggtgtttgcagcggcaaacgtgcaatatgtcctagcggcgtgcgccgaaaccggcgccgtgtgcgtccacagcgacgagtgttgtagcggtgcatgctcgcccgtttttaactactgtctaccccaatagccgaacaagactattatacacttgtattctataaaataaatgatagcacaataaataaaactaatatattatgataatattttattggattaaatttttatatgatgatataaatggttacatagtgatattttattggaataaatttttataataatgatataaatggttacataacacaataaagtaaaactcatatatcatgataattatatatatggttacataatataaatgtttattgtaagttttgggcttcgtactcttccaagcgttcccggcaaattttggcgtgcagtttcaggttatagtacctgacaaactcgccgtgtgtcgaatgtgtggcgtgcgtctgcaccgcctcagggtggaagtacaggtcgtcgtacttgccgttaaaaatgtaccggttggtaaagccgcacttgctgcagcatagcaccgggttgctgtaatacattttattttttttgcaaactgcgcaataattgcctttgacgggcctcacgggaaaggtgatgacgcccgtcacaaactcttggatggcaaacccataaatttcggcaaacacagtgccctgaatggaatcaaacgctccgctgtcgagcgctttcataagctcgctggagctgctgaccgtaaaacagttgacgtcgtcagacgccgtcggttccttgtaaatgttgcggtaacgcatcagccgaacattgtggttaatctctttgagcaccacgccgccggtggtgcgcagcgtgatggaaacaatgtgctcgttggggcgcttgtactcgcgcagcaaccgctggatgattttgaaggggccttcatggtgcacaatcttgacgtcgttgtaggtgaaatactctgttttgtactcaagcggaaacacatactggtagaaaaaccccgcctcaaccaggcgctgcgcgtgcaatgagttgatgccggggtacacctggtgcgagttgagctggtctggatagttgtcggcacagtcacagcacgcaaactcgaaacagtcgggcgtgttgggcgacggcacaaactcttcgtctgcgctagccgcgcgcggcgggtggcgcacaatgacgtagagcatccacacgcgcgtgttgtctttaaacttgtagccgcacatggtgcactctgactcttgcacatactctagctcgttttttagttttaggcccgccgcgcggccaaaagtgagcatgtctttgctgttaatgtagcccagcacgtagttggtggcaaaccgcagaagcgacttcatggcctcgcgctcgttgtcactcaaaaagtgctcgcgcaggtcgcgctcgcaagcgtattccagtttgtggctgcaggccggcacctcgtcgaagcgaaagccgtactcgggcggcacaaaactggcggagatctcgttcagtctgtcgctgccgcggccgatgcgcttcacgatggccgcgtgcgccagctcactcttgttgagcggcttgacacggcgcggcgcgggcgaaccggcgggccggctggccgtcggggaggcgccgagcttgctggccgcgggcttctttgccagcttgttgtcaaaaatgttgttctccttaaaccaattcatagtgggtcccgtacaacacaatactgtgcatgtttgtatccataaccgcttatataccatttgtggtatctaatctgcgcgttatctccagataactcatatcgttatggcgctttaaaatgattcatgcagttatctattgtgtttgttcaacaagtcacgtaggcgctttgcgcacggccccagcgttatcgcaacacacaagtcacgtaggcgctttgcgcacggccccatcacgtgtctgaaggctatataaagcgagttgcacgatctggaaaatcagtttggtgttggcagcgcgttcgtcaacatctaatataagtgatgaccgcggcgtgacgcaacatgataaaaggcacccattggcccaatttagtttcgaagagctacaccgacgcgtgcgagaccagcaaggtaatggactttaattttatttttgcgcacatgtactgtgccgacatgtcaacagacggcaagctgcaggccggcgtgcgcgccgccgcgtttggtttggtcgacgacaagcattttgaactgtacaagcgccgtatcgaaaacgccctcttccggtaccgcgaccagtgcgacggcaacgccgcgccacccgcacgattgtccgacaacggagactgctgccaccactttgtgcgcgacgccgcgcgagtggtggagagcatcaaaagcgtggaggcgaccagcgtgggcattaacgtaattgtgctattgccctatttgaagcagctgcagattgcgctcaagatgttgagcgacgcgtttgcgtgttgtgccaaaacaattggcgggctgcaaatgtacgtgcaagatctactttcgcactgcctgttgtacgccgacagggtcgaggcggccggccgcgcgctgcaggtgatgaacctgtttttgaacagcggcggcccgctgtacgagtgcgacctgtgcaaggaggcgtccgccgacccgcggtttttgaaacccaaagagtgttgccagtactcgctgtgctacgcgtgctgcgtcgcgctgtggaaaacggctagcacgcacgccaagtgtccggcgtgcagcacctcgttcaagtcatagtaagtgcgtaccatgagcggcaacaatctgatagcgctagcccaggaccagttcaagtatctgtttctgggcagctattttgatctgaaagattttagccacgtgccggccgaggcaaaggcgttcatcggcaactacctggactgcaactttcgcgtgctcgacgatgccacgctgcaaaactacaccggttacctgcgaagcatccagctgcggcacatggtgggcggcctgctcacgcccgacgtttacaagttcataaagccgcaatttcgcttcgtgtgcgaccgcgccactgtagacattttggagtttgattcgcgcatgtacatcaaaccgggcacgcccgtgtacgcgaccaacctcttcacgtccaacccccgcaaaatgacctcgttcatatacagcgagttcacaaaggtgtacaaaaaccggctgtttgccaacacgaccaaccacggctgcgtgctagccggcgccgccgggtttgtgttcgaagacgcctacgtagactggtccggcgtgcgcatgtgcgcggcgccccggctggacaacaaccgccacccatttcgattgtacttgttgggcgaagagatggccgcgcactttgtcgcccataacattttgccgccacacccggccaacgcggcgcgcgtcaacaacagcatgtttatgctcaaaaacttttacaaaggcttgccgttgtaccgtcttcagtaccaggtcgtcaacagcatgaagtttaccacgcgcaagcctaaccgggtgtttgacgagatcgacaaagagttgaacagccactcgcccttcgtgaagctcattcagcgcgactacatctacgacgcgcagtttccccccgacttgttggaggtgctcaacgaatacatgacccgcagctcgttcatgaagtttatcaccaagtttgccatcgaagagaacgcgtcggccaacgacatgctgcgcgaagtcgtttttgaccgctacgccgtggactgttaccgcaaactgtacataaaaatggagctgaccaacgtttttcctgccatgtacgacaacgaatcggcgtatttgttcataaacaaagacttgctgcaactgaccggcacgctgaacgcgttttacgcgcccaagctgcgcattctcagcatcctgtcggtgaaccggctgtttggcgcgaccaagacgttggactaccaccccaacctgctggtgtaccgccaaagctcgccgccggtgcgtctgacgggcgacgtgtacgctgttgataagggcaaaaaaatatttttggtaaaacacacgttctccaacacggtgcctgcgtatcttttagtaagaggtgattacgaaagtacgtctgagctaaaatcgctgcgcgacctcaacccctgggtgcagaacacgctgcttgagctgctcattgtcgacgacccctccgtcgccgcgcacaccgcaaaaaacagcaaatagcatgatttacaccgaccccgccaccggcgcgaccacaaacaccgacgcggccggcaacaactacctgaacaggctaacgcccaacacgtttctcattattctggccgtagtggtaatcgtggcgctcattatcatcttcatgcaatccagcagcaacggcaacaacagcagttcgcccgcggccgttccgcaaatgggctttccgctgaacacaacgatgcgcgccaacccattcgtggccacgccgcaacgcttgtaaataagtagctttgggaacgcagcgcgatgaagcgcgtgcgatgcaacaaggtgcgcaccgtcaccgaagtcaagcccaacaatgctaaaattcgcaaaacctatgatttgaacgagtttgacctaaagaacctgtcaagtttggaaagttttgaaaacaccaaggtaaaactggcgctgagcaaatacatggccatgatcaatacgttggaaatgacccagcccctgctggaggtgtttcgcaaccgcgcagacactcgccaaatcgtggcggtcgtgcaggccaccatggggtttgtgcacaaccgattcaatccgctggtgacgcatttcaccaacaagatggagtttgtgacaacggaaaccgccgaaaccatcattcccggcgagcccatcctgttcactgaaaacgacggcgcgctgctgtgcgccatcgaccggccgtccatcgttaaaatgttgagccgcgagtttgatttgagcgtggccgcagagccccaaacgtccaaccgcgaagtgctcgtcgccaaaacgctggtatccaacaagcgcaaacggcgcagcagcaacgacgagggctacgagttcataaagcggccccggacctttagcgagtacaaccagtgcatggacgcgttgtccgactttaacgtgaccgaaattgaaacgacgcaatatctgctgttgctgctgatagttgagcacgcgtacttgcactattacatatttaaaaactatggggcgttggaatactcaaagtcgctaatggaccattccttgtttgtaaacaagctgcgctcgtctacaaacgccaaaatgcacaatttactgttaagcaaattccggttcaccgttgaagagtccgacaagactagcagcggcaccacttccaaattcacagtgtacaatttcaacaaataaattatgattttgctagttttgtttttggttttgctcaaagtgctaattttcaagcggctcaacgaaatgcacctggactcgcaccacaaccaaatctgcccccgcggctactttggcttgaatgcggacccgtttgactgcaacgcgtactacatgtgcccgcataaagtgcgcatgttttgcgacccgggccacgagtttgagttggactcggccacctgcgtgcccatcgagtatgattgcttggggtcgggatgcacggcgcgcctttaccgcaacttgttgttgtaaataaaacaaatatacaatgattaaaagatttatttatttacgcctcattttaaccacaacagaaacaattgtagggttttaaaaaactttgcaaacttaacgtagctcgcgcgctgctcgttttttccttgaatttgatggcccatgtctggcgctcaccatctgcgttgcgcatgtacacatcaaatcataattgccatagcccgactcgtactcgtagtctacctcaaaggccgaaaccttggtggcgtcaaacttgccgcgccagacgtttttgcacttgtagctgtagaccacgtcgtcgttaacgtaaatgcaagcgtctatgcacattgtgcaaatgttgcggccacgatgtgctatgagcgctgaagcggttcagcgcagttttatactggcctgcacgccgtcaaattgcaccacgctgtcgtcgacgcgcagatcggggcacagcatagccattgcggccacatctttgtggtgcgcgcggcagcgttgcagcgtattcaaaaagctggcgggcacgttgcccgccagcgaaatgagcgcttttgggtagcactggtccggcccaacgttactgtgcacgcgcagtgcccggatgtgccgcgtgcgcttggcctcggaacggcggtggacgctcaacacgtgccacgcttcgggcgcggcgcggccggcgcgcacgacggcgagccccaacggagcggtgtacctgttatgtataaaaagctcgcgaaacacgcacggcgcgcgcacgcagcttagcacaaacgcgtcgttgcacgcgcccaccgctaaccgcaggccaatcggtcggccggcctcatatccgctcaccagccgcgtcctatcgggcgcggcttccgcgcccattttgaataaataaacgataacgccgttggtggcgtgaggcatgtaaaaggttacatcattatcttgttcgccatccggttggtataaatagacgttcatgttggtttttgtttcagttgcaagttggctgcggcgcgcgcagcacctttgcgatgcccaagaatatggaaactctacagcgttcgtatatgggcccgtccacgccaaaccacaatttgttcaacaatgccaccgagctgccggacgacctaaactttagcacaatggacgtcccctacgacggcagtatgcccatgaacatgagcagcgacagccttatgaacctgttggaagaccgcagcaaaaagttggcgtgcgccgtggacaccgaactggcgcgcgagtccacggcgtccgagttcgtggcggggtttagcgccgactcgccacaggcgcagttggcggaaaccggcgcggaaaccggcgcggccggcggctccaaacgcaaggcgtccgaggtggacagcgactcggacagcgacgactcttcaaagggcaaaaagctggtcaacaagcccaaaatacgccagcgctacaaaaaggccaccattcaaaacaggacttcgctaacggaggagcggcaatattccaccgagatttgcaccgtggcggctccggaccaaattgcaaaatattttgcgcaagacttttccgcccacctaaacgaggtgaaaagcgagtgccaaatgagcgccaaccggttttcggactacatctccgaaaccggatattacgtgtttgtcgtcaagaaaggcgaccgcaaaccatttgaggtggtgtttgcgaaatttgtcaacaacgcaaccaacgagtacactaacaattactacatggtggacaatcgcgtgtttgtggtgtcgctgaacaacgtgaagtttatggtgtcttacaaactggtgcgcgagcagggcattgacattccgccgcacgtgaacctgtgtaacgacgcgcaggcagagcgcacgcccttaaattgctactttgagccggtgaaaaacgcgtttcaagccacgctaatcaaccattttcacctcgacatgttctacgcgcaaaccacgtttgtcactctcatgcaggctgtaggcgaaaacaaaaccaacatgttgctcaacaaactgtaccaaatgtatcaagaccgctcgttgttcacgcttcccataatgttgagtcgcaaagagcccgtgaacgaaaacgcgccgcagaacaaaaaccacgcgttttcgtacgtggcgcaaatcatgaagtattccaagaacttgcgatttccccaaggcgaccccacccagcaagtcatggaccggttagaagaaatagtcacccaaaaatcgtcgcttacctacaagtacagcagcgtggccaacttgctgtttaatcggtacggccgtcgcgacaacaacgcggacgcgctcaagaaggtcaaaaaggaagacggcaatcgattgttggtggagcagtacatgtcgtacaacgaaaatgacgacacgagccacaactttatcgtccttcagtttggcggtgtcaacgacgagcggctaaccattgccaaaaggggcaaagagttttattggattgcgggcgaaatcaaggacattagcgtggacgacctgatcaaaaaatacgcccgcaacgtgcatcacgtgtttaggatcataaacgtaaaccggcgcgaaagcacgacgtggcacaacaacttgttgaaactgttgcagctgctgttacaaaatttaattaggttagaagacgtgcagcgatattctgataaaagtgatactaaatttgtttataaaaaggtataataaagtatatagtattaatggtttttttatttcaaatttgttgttgcgggttcaaatttgttgttgcgggcggcggcacaatgacgacaggcggcgcgttggtcgtcgacgacccgccgcctttgattagaaaccggtatatgaggtagacgacgagggccaaaaacagcacggcgccgatcagccaaatgagcggcatgagcttgttgctcacgctgtcgctggagttcgaggacttgcctacaaggccctcctcgcccaacaaatggtccaaacccaagtcgccaattagatcgcccaggctgtacggctcgatacacatgatggtttggccgggcagcaggtcgctgacgtccacaaactgcggcgagtcggggtcggcggcggggtcgctttggcggcacaccgtttgctcctgctcgtagttaaacccgctgcaaatagcctgcagctgggccgtgttggacacgagcgggtcgttggcacaaatggccacctcagacgtgttcatgtttgggtcgcgctggcacgtgcggtgaagcaacaggcacgcgtcggccgtttcgccgccgtccgagccgcgcacgtagtagctgccgcccgtgttgttgagcgcgcggattatgtcttgcaccagcgtggcggcgctaaaggtcagatacgcgccgccggccagcagcacacccacaccggccgctttggcgccctgcaagtacgtgttgaggcgcgggttttgttgtagcgcgcggtccacgccctcggccgagcgcacgttggtctcgggaaagctctgtttgaccgcgtcgccgcgcgtccgctttacgtgcaagttggcgtcgggcacgttgtcgacgcggcgcagctggttcagcgacccgatctgcgggtcgctgatgccctgaaacacgccgcgaatgcgcggcacatcgttgctgcgcgtgatgcggtttatgtcgcccgcgctcacaaactggttgttggacaggttgtagcccggctcgaagcggccgttgcccagattgcgcgtgctgggcacgtttagcacgtttgtaaaccccgcgggggttgtgtttagcaaaagtctgttgtcgactatgaagctggcgctgtcggggtacaccttgttgacgcgccgcaagttggtaaagaaactcatgttgggcggcgttgtggcttaatatgaaacaacatgttaatacaaccgtttattataatacaacacaacatgttgatacaatagttattggtttacaataataaatttgaacaataatgcaacgtgttaacacgcctagtttattaaacaatagtgcaacgtgttgacgcaactagtttacaatataaatttaacaagggtgctacgtgttgacgcaactagtttatttcaaaaacaaatcaaaagcaaacgttgccacggcctcgtttgcgtcacagtcgacgcggtggtacagttgtgccaaaacaatttggcgcattttgtcgagaacctcaaagagcgtggcttcgggaaactcgttgctcgtcaacataaccggcgtttcgtttttgttgacagtcacagtgattaggttgttgttggccagcgttttccacagcgcattgctagaatttttgaataaaatggtaaaattatcattggaggtcactgacaaccagttaaacacaatgtccgtgatggtgtccaggctgcagaagttctctcgaaactcaaacacgtcggtttggcgggtgtcccatttgcacgcggtccgataatcgactccgcggttaagcgcgttgtacacgtcgtgctcgaacatgtcatcaatcgcaaacaccgacatgcgacacgagtacaattcgacgtcgcagctatcctcgccatcaaagtggcgccgcaatttttgtttaacaaactccgcttcgtcatcgtccgtgtcactgtcgctggccgccgaatggcgggttttgcgcaattcttttttggcggcaactttggttttgaaaaactctgcgttgaccgtgtaattgtcgggctccaactcgtcttccgatgtggggttgcaggcgaatttatggcaatcaatgttgccgtgcacgcatctgttgcgacgcgacacgcaaaaccgcacagtcgccgtgactggcaccttaacgcgcgcctcaacggcggccggcgtaaactgcgcgcgtgcgccggtcgtgctgtgcaccgagttcaaaaccagcagaggaaagctggctgcgcacacgtccatcttgcacgttgtcgggtttgtgctgaacaatgcggactattagctgcgtgccaatgcttgttgcaggactctgcgtgctgatgcttgttgcctgacgccgtgaagactgtgcatgtatttgaacaggtcccgcttttatacccgctgttatcgtgcttgttatagataaacacttgcacgtgtgattggtcacgtaggccaaaacgtgaggctagtcacgtaggccatcagcgttatcgccccactatcagcaggccgataaaacttggtataaatacaaccgcaatgtttcagaaagcacagttcgactggtaactcaacatgaacaccaacaaacacgtgaagacctacatgaattctattgtgtttgacactgcggctgtgcaagctgcggcggctttgcagccaataatggagaccgaggcggcgcaaagtgcacaagtgccgcacagcagcgaggcggctttgcagttaatggtggagaccgaggcggcgcaaagtgttagtgctgccccgcaagaagttgccaatgaaatattgcaggatgccggcgacacgagcgcacgtgtcataaccacaacggatgccctgcaagttttttccgaagccgtgcaagctatcggtgaagttattcaagaaaccgcggacggcccacacgcaattattgaagtaaaacgagccgtttttgatgcaacaaaaatgctggcccaactgggcacagctgtggtgaaattttacagccctctttttacggcgcccgagcgcattgtggaattagtttattcaatttctttgctggtgaggattatgaaacgaatcataaaaaacgacagcctggataagttgaccgtggatggacttgacagcgcggcaacattgcttgccgacgtgcgctctataattggcgacatgtttgaagtgtttgtcgtcaacttcaggtatgcggcgcccgccgagtactttgaggctgtcgacgaaatggtgcacaccgtcaccgatttggccttgcatgttgtcaaaaccgtgtgttaaataatcattatgtattaattatatggttcaataaaatttatattttataaatttattttgttaattgatagtgcaaacgttaattttatatataaattataatattatataaataaatgtaatatatgtttattaaattaattaataacttgtaattgttgatatgtaatgtttattaaattaattaataacttgtaattgttgatatgtaacataataaaacaattaaaacataataaaacaattaatttttctaaaagtttattatatgatcaattgtaaattttagcatacatgtagcttgtatcaatataatgttgtttatacaaaaaatattacttacaactaaaataaattaaaataataacaatttatattaatttaatgtatacaaataaaatgaaaagtgcgggtaaacaaattcttcttcaaacgctttggcaagcgcggcgtcgttgttgacacgctgcagctgcagtttctcgcaaagctcagcgcgcagcttcttagccttgtacagcctgcccagcttggcggcgcggtgctgccgtgccacacgaacctgctgctgcttagccatgcgaatcttttgccaagaattcatgatgataaacaatgtatggtgctaatgttgcttcaacaacaattctgttgaactgtgttttcatgtttgccaacaagcacctttatactcggtggcctccccaccaccaacttttttgcactgcaaaaaaacacgcttttgcacgcgggcccatacatagtacaaactctacgtttcgtagactattttacataaatagtctacaccgttgtatacgctccaaatacactaccacacattgaacctttttgcagtgcaaaaaagtacgtgtcggcagtcacgtaggccggccttatcgggtcgcgtcctgtcacgtacgaatcacattatcggaccggacgagtgttgtcttatcgtgacaggacgccagcttcctgtgttgctaaccgcagccggacgcaactccttatcggaacaggacgcgcctccatatcagccgcgcgttatctcatgcgcgtgaccggacacgaggcgcccgtcccgcttatcgcgcctataaatacagcccgcaacgatctggtaaacacagttgaacagcatctgttacagcgacacaacatgagccggtccaacaacgccaacgcgcccacgccatccaaccgccgccgcaacctgtctctggtgcgcggccgccggctcacctactcgccgcccgacgccgcgtccgcgcagcgggcttcgccgcccaggtctgcgccgcgagccgcgccccggcgcgtgcacgccgtgggcgaccccggcgcgccgctgcgcgcctcttacgcgctgcccaacggcgtgtacaacttgcacggcgacgcgcacttcaacccgcccgaagaagacgatgacatcttgtttgtcgacaccgctgccgagcaagcgcgccagcgcgcggtgaatttgcacgaggcggtgaataggcacgagcggctaaggcgtgagctgggcgagcggatgacgcgctcgcccaccctgttaaactattcgcccagctactcgccaacgtcgccgcgctcgcgctcgccagacctcatcatgcccgaagatttacagcctgcccgggagcagccgctggcgcctttcaatgacagcgacgacgacgaacgcttgttggagcaggtgatgctggagtctgccgaggcgccgcagttgccccaggcgccgccggcgccgcaagtagacgtgtccgtgctgtgccacatctgctcttgcacgtttaccgacatccaaaactacaattcaaacttcgtaacctccactgagtgcaaccacgcggtttgtttcaaatgttacgtcagcatcgtgtttggcaaggaatcgtacaagtgtagcatctgcaacagaacgacgatctcgtgccgcgcctacaaccgcgacggttacgtggagctaagcaccatgagcacggtgcgcgacagtcaggccattaagaggcactgggcgcagctgtcggactccaacatgccgcacagcaacgagatgacgactatccaggagctgcaggccgagctggccgagctgcgcgcggccacggcgcgcgcgcatcacgacgtcaacatggcccgcagcgacagccagttgctgcggcagcaactggacgtgaaggaggcagagcttgcacacgagtcgaacgccaggctcaagctgcaaaaacaaaacgaaacgttaagcgcgaataacctttcgttgcaacaccaattaaacactcaagttattgaaagtcgcgttaaaatggagcagttcaaacgtcaacacgacgaatttatggaaaaatttaaactgtcattatcttagtttgtattgtcatgttttaatacaatatgttatgtttaaatatgtttttaataaattttataaaataatttcaacttttattgtaacaacattgtccatttacacactcctttcaagcgcgtgcgcacccgaaaagcagggtcgccgctgacgcactgctaaaaatagcacgcgcctttcaaaagcgttcacacccgaaaagcagggtcgttgctgacgcaccgctaaaaatagcacgcgccgttcgagagcgttcgcacccgaaaagcagggtcgccgctgaggcaccgctagcacacgccgttcgagagcgttcgcacccgaaaagcagggtcgtcgctgacgcaccgctaaaaatagcacgcgccgttcgagagcgttcgcacccgaaaagcagggtcgtcgctgacgcaccgctaaaaatagcacgcgccgttcgagagcgttcgcacccgaaaagcagggtcgtcgctgacgcaccgctaaaaatagcacgcgccgttcgagagcgcccgcacccaaaaggcagggtcgtcgctgacgcaccgctaaaagtagcacgcgcctttcgagagcgttcgcacccgaaaagcagggtcgccgctgacgcaccgctaaaaatagcacaccagggcgccgctgacgcaccgctagcacgcgccgttcgagagcgttcgcacccgaaaagcagggtcgccgctgacgcaccgctaaaaatagcacgcgcctttcgagagcgttcgcacccgaaaagcagggtcgccgatgacgcaccgctaaagtaaaacttttaaaatatctatataatgcataccttgtgaactaacgtgttgccactacagctcttcatgtatgaatgtcaacatgcacggcacgcggccccacttttgccacggccttatttgcagcttatcgttgaacaatggaggggcgcgctgggtataaatacaggcgtcgcgatctcgtaaacacagttgagtgagcttgcgcgcattgttaacaaggcaacatgtcctcaagatattcgccatacaggattagaaacgttggcgagcgtcgccgcgtgcaagaacggttgctcagcgagttcaacagccgtccggtcacggcagtggcggcggtttgcgccgtgtgtttggaaacgtactgcgtgcaatccaacaacattatcgactttttgatgcccagcgagtgcacccatttgttttgctacaagtgtgttttgaacatgtacaaaaacgccatgaacgttccgcgcgccgccgtcagctgccccatgtgcaacaaaaaagttggtacctggcaagcgttttttcccaacagtgtggtcagttgtaagtttatcaaaaaaactggcgaccgcaccccggcgtgtttgcagtttatgttggcgctcaaaacgattcaggaccgctacatggccactgaggaagaggcagaaaccgagccgtcgttcgtgataaagaacctgcaagcgcagctggacgccgcgcaaaaagaagctcgagatttgcaagagtccatggagcgccaaaaacaggcgcacaacgtggcttggaactcttcgtgtgagcaggtcaccgcgctgcagaccacattggcggacatgcaagcgcagctggacaggtcggaagcgttgagttcaacgctggccgagcacaatcgcgcggccaacgtgcagatcgacagtctgcggcgcgcggtgcagcggctggaagcggcgcaaagcgcgcccgtgtccgtcaacgtggagttcaacgacaacgcgcggcaaaacacaaatctgcacgaacgttttcgttcgtacgtgtactccaccgtgtcggacatgatgattgaagacagcatcaagagcttgcagagccacgtgtttggcgccgcgtgcctgccttgcagtgtcaacgttgagataaactttccgtttgacgaatagtgtacacgtttgacaaatgtatagtaatataagtatgactgacgtaaataaaagtatgtttttggaacatgaccaatcgtttattgtgcacccccctgtcgccgcgcccacg

SEQ ID NO: 12 - DNA, 132959 bp, Hyphantria cunea nucleopolyhedrovirus
atgccagacttctcgtaccggccgaccattggtcgcacatacgtgtacgacaacaaatactacaaaaacttgggctctgtcatcaaaaacgccaagcgcaaaaagcacctgcttgaacatgaggcggacgaaaagtttttggacccgctagaccactacatggtcgcggaagaccctttcttaggacccggcaagaaccaaaaattgacgcttttcaaagaaatccgcaacgtcaagcccgacacaatgaaactgatcgtcaactggagcggcaaagagtttctgcgtgaaacctggacccgctttgttgaagacagttttcccattgtaaacgaccaagaagtgatggacgtgttcctggtcattaacctgcgtcccactcgccccaatcgttgctacaaattcttggcgcaacatgccctccggtgggacgacaattacgtgccccacgaggtcattaggattgttgaaccttcgtacgtaggcatgaacaacgagtaccgcatcagcttggccaaacgaggcggcggctgccccataatgaacattcacagcgaatacaccaactcatttgaacagttcgttaaccgcgtaatttgggagaacttttacaaacccatcgtgtacattggcacagactctggcgaggaagaagaaattttaattgaagtctctctcgtgttcaaagtaaaggagtttgcacccgacgcgcccctattcaccggtcccgcgtattaggcgacagacgatgccaacaattggttggcggacaactggttggcgtatgttgaaagctcgctaaccttggcatcaaaaggcgcgtttactaattttaaatgcgcacgcgcttcttcgtatttgccggccaaaattaggtcttctatggccacgtaaaactgcgccgcatctttagcgtacagcgccggcgcttgctgactgtcaagcgcgtttgcgggcatcaccacgcgttccctaaaactatttaacttgacgtttgccttctccacgttttcgattgttctaggtttcttttgcaacaaactagttgcggtgtcgactaggtttcgtaattctatgtcatcgttagttttgaatgcgtttgaacttttaataaagttgtgcaaatttactgtgtattttaactcgcgcttgtcagccttttcaatgtcagggtctacccagctgtcggaagactcgctcgatattcccgacgcttctgaatcggtcatgtctttgcgtcgcctgttcagcgtgttagctaaaataacggccacgtcgtttgaaggtgttggcgggggcttttcgtgttttttgggcctaattgtttttttgagcgttcgcccgaccgtaatttgctcgagcaactcgttgcgcgcgtcggacactggcggcgccgcggcgggctcaaccttttttagcgtggtgcccgatctgatttgctccaataacgcatcgcgcgcgtcgccgccggcgtttttgttaggctcgctaacaattgcattcaataacaaattgtcaataggtggcaaagacaatggcggtggaggtggcggtggtggaggaggcggcatatttggcggtggcggaggaggaggaggcatatttggcggtggcggaggaggagttggcggtggcggcacatttgtatcaatggaagcaggccgagttaaatggtcgggtttaacgggtaccggcggtttgataggcgtctgtacaagctgttcagaaggattggcaatataattaaattcttcgttagtaggcctagaaatggtcatggttgtggcttggggcagctgcgtaggcgtttgcggctgttgctgtgcaaacataggttgttgttgttgttgttgttgttgttgttgttgttgttgttgttgttgttgttgtggcaaattaaacaacgaagtgggtcgcacacgttgttgtgaagaaatgtatttagaatattcttcataaaaatcactgctcaatactccaatttctacatcgtgcactgtgtccaaacgcaataaaccttcgaggcgcgttaaaatgtcgtttaaattgcgtctaacatttaagtcttgcacggtaatcattagctggcgcatacgccctaatgtcgcagaatgccgcgacgcgtctacacggtccacgtgcatgtacgccacgtctgtgtaaatattttcggccagttttagcaaatttaaaactgctgttctgtcaagcctaattgttaggtcgtttagacagcgtttaagatcgtgcgcctcgggccctgccacccgccctaaaaacgtgccagcgtcaatggcgtcaagctcgttgttgattaaataagaccgaacagactggtactggcgctccatcatggacgcaactttgcaatcggcggtacaatttgtaaaagactgcgttgttcttacacctaaagtggtcaacggtaggttcggcaaaattgacgtgttgcaccatcggcccaccagcaaactctatttgcgcaaaacaatttccgccatgaacttcaacgctgacgagataaacgtgcacgacttgatggctgaccaccctaattttatcaacatgtatttttgttacggtacgcccactgcttgggcgatcgtgatggactatgtgcaatgccctgatttgtttgaaacgctgcaaaccgaaggggcgttggaaaatgcgttagtgtcaaatattgtgcggcaattgtgcgacgcgctcaacgacctacacgccacaaccggctacatacacaacgacgtcaaactagagaatgtcttatattttaaagcgcgcgaccgcgtgtacctttgcgattatggtctgtgcaagcgcgagcactcaccgggcgttcacgacggcacgttggaatacttcagcccggaaaaaatcagacggcacaactacgcgcgctcattcgactggtacgccgtgggcgtggtgacctacaagttgctcaccggcggtaagcatccgtttgaacgcagtgtggacgaggtgcttgacttgtccagcatgaagcggcgccagcaatacaacgacatagctgtgctgaagagcgtgcgcaacgcgcacgcgcgcgactttgtgtactgtttgaccaaatttaatttggatggtagattaatcgattacaaacgaattgtcaaacattcgtttttggtcaccaagcacaattatatttgaatgttgcactggttcgacaacgtctctgccggttggttgttttcggcagcagcaacattatcgcacgttgccgaattaagcacaaactccgtgtgcgcttttacgtttaaacatttgtcgggcgtggccacatttccggatgtgtcaaaataattatcgtcgggcgtaagcgctgtaacgggatgcacaataaaagcattatgttctaataataaatttttattcacatcacccatacttattattcgtcgtcaaacggtaaactaacattaatgtttacagaacacggtaaacatgcaatgccaaacacatgagtttgcaaacttttaattttgtcttcaatcatcatgtccgccacggtagaatacacgcgcgagcgaaattgctcgtgcaaattagttttttggcgagcgttttcattaaactcaacgttgacggcaacatttttttttatttctaattggtaatgtccgtgatgttcgtcgttttcgtcgttttcgtgatgttgttggttttcgtggtttacaaaattttgcaaaactttaaagagtgcgacaaacgtacgattttggtcggctaacgtttgagtgaacgttttagatttgtccagttgtgcttgcaaatctatcaatttgttttgcaaagctaaaacttgttcgcacgacgaagaccacgcaatgtcatgttgacgtttttgacaatttattatttcttgcaaacgctcaccttcctgtttgtatttattaacagtttcttgcaaacgctccgcttcttgtttatgtttatcaacaatttcttgcaaacgctccgcttcctgtttgtgtttatcaacagttttttgcaaacgctccgtttcctgttgaattaatttattattctgcgaaactgccggttcgtcgtcgtccgcgtcagccgcacaccgctgcttaataaattgcaccgcttctacaaactgctggcaaggcggcacgcggtcgcccgttttttttataaacttgcaactcaccactgcgttaggaaaacacgatcgccaagtagtcacgtttactttacacatcggacaatcaatagtagcacgcggtatgttcatggtgttgcagtacatgttaaggacgcacttgtagcaaaacgcatgtgtgcaattgctggacattaaaaaatcggtgatgttatgtgactgcattttgtacgtgtccaagcacacagcacaagtcgctttaaactcggcgaccggtttattatttaaagttttaagcatctgctcctgcacacgacggcgctgagtaggattactaaaactgtacggatgatatctgttagacatgttaagtcttatgtgttactgttagcaagccaaatgaactgtgtttacaagatcacaacaatcgtgtatatatatccagcgcgcccctccattgtactgatataacccctccattgttactgattattataactgctgattataatttgctgattataactgttgctatcaataacattttatattcatatcacattcaaattttaatagcgtgtgctatttttagatattgcgtcagctttgactttgtttttcaagtacaatccatctggtaaagcgtgtgctatttttagatattgcgtcagctttgactttgtttttcaagtacaatccatctggtaaagcgtgtgctatttttagatattgcgtcagctttgactttgtttttcaagtacgatcaatctggtaaagcgtgtgctatttttagatattgcatcagctttgactttgtttttcaagtacaaaccatctggtaaagcgtgtgctatttttagatattgcgtcagctttgactttgtttttcaagtacaaaccatctggtaaagcgtgtgctatttttagatattgcgtcagctttgactttgtttttcaagtacaaaccatctggtaaagcgtgtgctatttttaggtattgcgtcagcatttttagatattgcgtcagctttgactttgtttttcaagtacgatcaatctggtaaagcgtgtgccatttttaggtattgcgtcagctttgactgatattgcgtcagctttgactttgtttttcaagtacgatcaatctggtaaagcgtgtgctatttttagatattgcgtcagatattgcgtcagctttgactttgtttttcaagtacgatcaatctggtaaagcgtgtgccatttttaggtattgcgtcagctttgactaatattgcgtcagctttgactttgtttttcaagtacgatcaatctggtaaagcgtgtgctatttttagatattgcgtcagctttgactttgtttttcaagtacaaaccatctggtaaagcgtgtgctatttttagatattgcgtcagcttttgactttgtttttcaagtacaaattatctggtaaagcgtgtgctattattttgtttttcagtacaaacagctttggaacttaccatctggtgaagcgtgtgctatttttaggtatgatataaaatgtgtaaaaggtattgttgttatttaaaactataaattaaataattatataaatttaattatatatttgacattattatatattttacattacagatgatttaaatttttttaaaaaagcttcgtgttgccgcacaaactgatccattttaatcttgctctcagcaacttgcgcgtccaattgattttgcaaaaaagtattggcagcgctaagggtatcattttgtttttgcaattttactttcgcgtttaattcttgctgtaactctaaatttttaaaatcaacttgttgttgcaataacaaattgtcacttttaatcatgttaacctcgtggtgcgcgcgcgctgtagttgcgcgcaaatcggccaattctaattgtaactcttcaataattgttttgtctctgttgtgtggcatgttggattccgtcagctgcatccagtgttgtttaatgagtttgttgtcgcgcacagttctaaccgtgcttagctctacgtagcccgcgcggttataagcacgacacgtgagagttgtcctgttgcagatgctgcatttgtacgcttccttgttaaacacaatgctgacatagcatttaaagcaaacggcgtggttgcactcggacgaagtcacaaaatttgaattgtaattttttatgtcggtaaacgtacacgagcaaatgtggcacagcacttcgacgtcttcttgcggttcgggcgcaggctgcggcgtttgcggtggttcagcagactccaacagtatttgttctaacatgcgctcgtcgtcgtcgctgttatagtcgtcactgtcgataacttgaccgctgggcgagtgtaccggcgagtagtcgggcgaacgtggagttgttgttaaactttcgtgcaaattaacggcacgctggcgcgcttgttcggcggcatggtcggtaaaaataatactatcgtcgtcatcttcaggcgggttgaattccgcgtcgccgtgcacgttgtaacgggaattattgatagtataggacgcgcgcagaggcgcgttgcggtcgccaacgacgtgctccggcgtaagcgagcgccgctgccgcggcgttggcataggcgcgcgcgtctggcgcggcgttggcataggcgtggacggcgagtaggtgaggcggcggcgaccgcgcgccaaagacaaattgcggcgattggttggggtatctgcgttgttaatgcggctcatggtgatgtgtgttcactaagactgctgctgctcaactgtgtttaccagatcgtcgcagcctgtatttataggcttgataagataaagtacacaagtactttttgtatgcctgcgtccggtcacgtaggcgcgctgtcgccgccggcgcctgcgtccggtcacgtaggcgcgataacattttaaatccggtcacgtaggcgcgataacattttgttgcgcgcgcggagtacgtgactctcgacacgtatttttttgcactgcaaaaaagtttactctgtggtagtgtattaggagcgtatagaacagtgtagactattcaagtaaaatagtctacgaaatgtagactttgctctgtatatggggctgtgttcgataacgtgtttttttgcactgcaaaaaagttcatgtgtgacaagcaagattatcaagcggtggaggagaggggaagccggaaaagataaacgttggtataaaacgcgcggtagcaaatttgaaaacacagttcaactgaattgctgtgacagtaaccaactcgttagttaacttgtttgctttgcaatcacaatgaagaaccaacaacagttatccgctcaacaacaacgcgctgccaattcggcgcgccgattaactatcaaaaaacaacgcgccgacatggtgaaaaaactgagcgacagcatgtccgcttggttagcaacggctccaactagaccatcttatccgttggtgtttttaaactctatgcacaacaccaccgccggtgctaatgtacaatttaaaccggtcaccgtgcaaacggcgcacattagaatacccattacggcaactgtgcggtttaccgtggcaacgcactgccgttgcatgcacggtaacattgattgtcacaagtttgcctgtaatccaaagtgtaaagctgatttggaaaccggcaatacagacattaacaacgcgttctacaaattgcaagaagatgctgagaaattgggagttaccattgaacaattgcaacaacaacaagataaagaaattgaccaatattttagtgctgataataattcgtgcaatttatccatatttaaaatcgacaacctgttcaagcaaaaagaatacaatggttttaacgacagacggcggcgaacggcttgcgcgttaaacaatcaaaacattgatgtactcaagtacaaagaagattttgacgacgacgacacgcaaactaatattagtttgaaaatgctgtcggtaacgtcaactggcaattttaacattttgtttcccgaaacaaacaatgcgtcttggaaaaaattggccagcaacaacttaattactgtgtatgacaaccaacaagaaacgcctgttattcaaacgtttaacaaatctgttgaaccatttgtatgtgtggccttaaagcaaatccgccagatcattatgtcgcaattgtaccaacgcgttgaaatcaacgtaaacaacgctatggccacatttaactttgatatgttaataaattaaaaatttttttaaaattaatgaaatgtgtatgtaaatatattgtatgctatttattttaaaataaaacatttttatacatttacatttgtgtttattaattaagttctaaactccgcacaacatgagtttcttctctaatttacgacgagtaaacagggtgtacccaagcaatgccagttttgtaaccgacaactcgcgattgttaacctccacgcccgcagggtttactaacgtgctcaatgcaccaagcacacgcaacttgggcaacggtcgttatgaaccgggctatttgctatccaacaaccagttcattagcgcgggcgacatcaaccgcattacgcgcagcaatgatgtgccgcgtattcgcaacgtgttccaaggaattaacgacccgcaaattaactccttgaaccagttgcgtcgcgccgacaatgtgcccgacgcgggttttcacgtaaaacgcacgcgcggcgacgcggtcaggcaaaattttcccgaaaccaatgtgcgctcgcccgaaggcgtcgacaacgcactgcagcaaaacccgcgcctaaacaatcacttgcaaaatctcaaaacggccggcgtggtcgtgctgctggccggcggtgcgtatttggcattcagcgcggccacgctcgtgcaggacattatttgcgcgctaaacaacacgggcggcagctatttcgtgcgcggctccgacggcggcgaatcggccgagtcatgtctgttactgaaccgcacgtgccgacgcgaccccaacatgaacacatcggaagtggccatttgcgccaacgacccgttgatctcagacacggccgagttgcaagccatttgcaacgggttcaattacgagcgggagcaaacggtgtgcaggcaaagcgaccccgccgccgaccccgattcaccgcaatttgtcgatattagcgacctgttgcccggccagaccattatgtgcatagaaccgtacaatttggccgatctaattggcgacttgggcctagatcatttgctaggccaagacgggttgctaggcaaactttctaattctagcgatagtattggcaataaattgatgcccattatatggataattggcgcggtgttgttcttgggtctggtcatttatttaatatataggtttttaattaaaagcggtggcggcggcggcaatagcgtcgcttccgccaacactccaccatcaatgatagtaatgccacaacctttgcctttacaaacaagagggtaaaacaaattaaatagtacaaaatatattataaaaaatatattatattataaaattatgtcagtcattgattaaattcgagttgagaaaattggtcgttgtcttgattttacatatttgagatttgagttaaatataattacattttaaaacttatataatattaaagccttttgtacacaaatttactgtcactcttttcggaatattgtttcacatcgtctattctaatgagattttgcaacaacagctgaaacatttttagcaaattgttgtgccaagttgtgctttcgcgccggttaaccttaatgatcctaaacacgtggtgaacgttacgagtgtattttttaattaaatcgtccacgttaatgtctttgatttcgcccacaatccaataaaactcgttgccttttttagcaatagttaaacgctcgtcgttgactccgccaaattgcaagacaataaaattgtggctggtgttgtcgttttcattttgcgacatatattgctccaccagcaaacgattgccgtcttctttcttcactttttttagacaatcggcgttgttgtcgcgatgtccgtacctgttaaataacaaattggccacactgctgtatttgtatgtgagcgaagatttttgcgtcacaatctcttctaatttattgataatattaatgtctgggttaccgtcgggaaaccgcacatttttggaacatttaataatttgagccacatacgacgacgcatagtttctgttttgcggtgtgttttccaacacgggttccttgcggctcaacattataggcaaagtaaacaacgaacggtcttggtacatttgaaaaagcttgttgagcaacatgcctgttttgttttcgcccatagactgcattaacgtaacaaaagtggtctgcgagtaatacatgtccaaatgaaaatggttaatcaacgtggcctgaaacgcgtttttaacaggttcaaaataacaattgtacggagtgcgctccgcttgcgcgtcgtcgcacaaattcacgtgtggaggaatgtctatttcttgttcgcgcacaagcttgtacgacaccatgaacttgacgttgtttaacgacaccacaaacacccggttgtccaccatataataattgttcgtgtactcgttagtaacgttgttgacaaatttggcaaacaccacttcaaacggcttaaattcacttttttttacaataaacacataatagcctgtttcggatatatggtccgaaaaccggttggcgcttgattggcaatcgctgttcagcttgtccaggtatacggaaaagtcttgcgaaaaatattttgcaatttgttccgagggggctacagtgcaaatttctgtagaataatgctgctcttctgtcagtgtagtcttgttttgaatcgtggctttcttgtagcgctggcgcattttgggtttgttgacaagtgttttgccttttgaagaatcttcactgtccgactcatcgctttccaactcggacattttgcgttttcctcctttttgttgttcgacaagttgcacttctggctccaacgaattagcacgaaagcctgtcacaaatgccgacgccgtagactcgcgcgctaattcaaaattaacatcgtgcgtcaaattgtttgtttgttcttcaagcaacgtcataagactggtttcgttgaaaacgggcgcgaaatcgtcgggagcaacagcctcatatgtgccatttatcaaatttaaattgtcgggcaactcggtggcagtgttgaacaacgtgtggcttggcgtgggcggccccgtgaacattgaacggtgcagagcggccatatttttgggcattgcaaagtactgcgcgcgccggagccaacttgcaactgaaacaaaaatcaacatgaacgtctatttataccaaccggatggcgaacaagataacaacattacgttttatatgcctcacgccaccaacggcgtgattgtttatctatttaaagcgggggcggcaacaacggcttccgacaaaacgcgactggtgagcggatacgaaaacgggcggtcgataaacacgcatttatcggtgggcgcgcgcaaagacgcgttcgtgctcagttgcgtgcgcgcacctcgtctgtttcgcgaactttttgtttataataaattcacatcgccgatagggcttgccattgtgcgcgccggacgcgccgcgcctgaagcgtggcacgtgctcggcatgcgccgccgtaccgaagttaaacgcacgcgaaacattaaaggactgcgcgtgcacagcaattcgggaccggatcggttttatcacaaagcgcttatatcgttggcgggcaacgttcccgccaatttcattaggagcttgcagcgctgccgcacgcattacaaagatataaatgttttaaatttattgtgtaaagatttgctagttgacgatagtccggtacaattagatttacaaatgtgattatttacaattgttacggttgtagttaaaatgaaaccgtattaaaaattaaaaaaaatgtaaaataaatttgttttatttataataataagttacgatactgccgtgctgtgcacccgtttgaccaacaatcgtatttaacgggaacgcatgtggcagagtctagatcaaactcgtggccagggtcgcaaaacatgcgcactttgtgcggacacatgtagtacgcgttacaattaaacgggtccgcgttgaggccaaagtagccgcggggacaaattttgttgtggtgcgaatctaaatgcatttcgttgagtcgcttaaaaatgagcactttgagcaaaactagaaacacaactaataaaatcataattaatttatttgttaaaattatacactgtaaatttggaaccggcggcgccgctaattttatcaaactcttcaatgctaaaccggaatttgcttaacagtaaattgtatgctttggcgctcatggacgaacgcagcttgttcacaaacaaagagtggtccagcaacgattttgaatactcccaccgctccgtagtttttgaatataaaataatgcaaatacgcgtgttcgactataagcagcagtgttaaatactgtgtcgcctcggtttcggtgatgccaaaatcggagaatgcgtccatgcaacgattgtactcgttgaacgttgtgggcctttttatgaattcatattcgtcgtcatcgctggtgcgccgtttgcgcttgttggacgccactaacgttttcgcaatgcgcaagccgtaatcgggcgcttttaaatcgacggtcgcgtctacgtcgaattcgcgcgttaacattttaacaatagacggtctgtccacggcgcacagcaacacaccgtcgttttccgtgaacaaaatgggctcgccgggaatgctggtttcggcggtttctgtcattacaaactccattttgttattaaaatgtgtcaccaacgggttaaaccggttgtgcacaaatcccatggtggccaacacgacagcaacaatttggcgcgtatcggttttgttgcgaaacacctctaacagattttgggtcatttccaaggtgttaatcatggccatgtatttgcttaacacaagtttcaccttggtcgtttcaaaactttcaagacttgacaagtgttttaggtcaaattcggctaggtcgtaagttttaggaattttggcattgttgtgcacaatttcggtgacggtgcgcaccttgttgcatcgcacacgcttcattttgaaaataaaaaattacttatttacaagcgctgtggcgtagttacaaacgggttggcgcgcatcgttgtgtttagcgggaagcccatttgcggtgctggagcgggcgagccgggcgagttgggcgagctgttgttgccgttgctgctagattgtataaagataatgaccaaagccacaatcactactacagctaaaatgatcaaaaatgtgttaggagtcaacctgctaagataattgttgctcggcgcgtcggtgtttgtggtagtgccggtggcggggtcggtataaatcataattatttagctttaacaaacttggacttggtggtgtttgcggcggcgacggtgggaccgtccacaataagcagttcgagcaacgtgttttgtacccacggattgaggtcgcgcagcgactttaatgccgacgaactttcgtaatcacctcttattaaaagatacgcaggcaccgtgtttgaaaacgtgtgttttaccaaaaatatatttttactcttatcaacagcgtatacgtctccagtgagccgcaccggcggcgagctttggcggtacaccaacaagttagggtggtagtccagcgtttccgtcgcgccaaacaaccggttcaccgacaaaatgcttaaaatgcgcattttgggcgcgtaaaacgcgttcaacgtgcctgtcaattgcagcaaatctttgttaataaacaaatacgccgattcgttgtcgtacatggcgggaaaaacgttaacgagctccattttaatgtacaatttgcggtaactatccaccgcgtagcgatcaaacacaatttctctcaacatgtcgtttgccgacgcgttttcctcaatggcgaacttggtaataaatttcatgatggaactttttgtcatgtactcgttaagaacttccaacaaatcatttggaaattgcgcatcgtaaatgtagtcgcgttgaattagtttaacaaatggcgaatggctattgagctctttgtcaatttcgttgaacaactcgtttggtttgcgtgttgtaaatttgatgctgtttaccacttgatactgcaacaagtacattggcaaacctttgtaaaagttttttaacataaacacaccgttgtttacgcgcaacgcgttgttggggtgcggtggtaaaatgttgtttgtcatgaaatgcgccgccatttcctcgcccagcaaatacaaccgaaacgggtgacggttgttttccaaccgtggcgccgcacacatacgcacacctccccagtcaacgtaagcgtcgtcaaacacaaatccggcggcgccgcccaacacgcacccattattactgttgttggcaaataaccgacttttgtacaccattctgaagtggctgtaaatgaacgtagacatttttgccgggttggaggtaaaaaaattggttgcatacacgggagtgccaggtttgatataaatgcgcgaatcaaactctagtatgtctacggtggcgcggttgcacacaaaacgaaactgtggtttaataaatttgtacacgtcgggcgtaagagggccatttataatgtgccgcaattgaatgcttctaaggtatccaatgtagttttgcaacgtgtcatcgtcgagcacgcgaaaattgcaatctaaataattgccaataaacggcttcgcgtcgcttggcacgcgatcaaaattttttaaatcaaagtagctgcccaaaaacaagtatttaaacttgtcctgaggcagcgctattaaatcgtcgccgctcatggtacacacttactatgacttgaacgaggtgctgcacgccggacacttggcgtgtgtgttcgccgttttccacaacgtgacacaacacgcgttgcacaacgcgtactggcagcattctttaggtttcaaaaaccgccggtccgtggacgcttctttgcacaaatcgcattcatacaaaacattggtgtctagaaacaagctcatcacttgcaatgtgcggtttgcggtttcaattttatcagcgcactgcaagcaatgcaacacaagctcctgcacgtacatttgcaacccgttgattgtattgctgcaacacgcgaaagcgtcatggagcaacgcgagcgcggcctgcaactgtttcagatacggcagcaacacaattacgtttacgttcccgttgtgtataacatccatttttttaacacaatcgattatgcgcacggcgtcgccaatgaaatggtgacaacaacaatctttgggtaaatgtgcggatgttgttgagtcgtcgcattggtcgcgataacgaaaaaaatcattttcaatgcggcgtctgtacaattcaaagtgtttgtcgtcaatcaaagcaaaagcggccgcgcgcactcctgcttgcattttggtgtcggtcaaaatgtctgcgttgtacatgcgagcaaagataaaattaaaatctattatcttgttcgtttcgcacgcgccactgtccatgttgggccaataggtaccttttatcatgttgcgtcacgtcgcgttacatcacttatatcacgcggctgagccgtgcttaaataactcatcacattgttctagaacatagtcacgtgattataaacgtaagctccacgttgcctgacatcacttatatcacgcggctgagccgtgcttaaatgactcattacattgttctagaacatagtcacgtgattataaacgtaagctccacgtgagagattatatgtaatgcgcattggggattaagcgcgcagaagatagcgcgcagataagataaacaaaatagtatataagcgccgacggcagcaaacatgcacagtattgtgttgaagcaggacctaacatgaattggttcaaagaaaacaatatttttgacgcaagccctgcgtctcgcgtcaagccgggcaatagcaagcaaaaaaattccgtcgcgccaactactgttgttgccaagcaactcgttaacaaaccgccggcgaccgttttgcctgtgacgcgcaaaagcaagctgaacaaaagccaacaggcgcacgaagccatcgtcaaacaattgaaacaaggcaagaatacacaaaatagaatttgtaccaatttcgtaccgcccgaatatacacaaaatagaatttgtgccggtcttgtaccacccgaatacggttttaaatttgatgatgaaccagctaccagccacactctaagccacgatgaagaacgcgatttgcgcgagcactttttgagcgaaaacgagcgcaaagctatgaaatcccttttgcgatttgctactaactacgtgttgggctacattaatagtaaagacattcttacttttggacaggcagcgcggctacaagtaaaaaacgggttggaacacgtgcaggaatctgaatgtaccatgtgcggatacaaattcaaagacaacactcggttttggatgttgtatgttattgtgcgccaaccgccgtgcgaaaactccagtgcgagatgtaacaaacctggttgctttgagtttgcttgccgcgactgcggctacaattaccacgaccaattgaatgcccaccaagtttatccaagtattgactcgatacacgtacagcgcttgttcaaagctggttttttttaccaatacgtgtttcctcttgaatatgaaattgattattatacaaacaacgatctacaagttgtgaatcaaaaaggcccgttttctattatacgcgagttgttgatgaatcataaacatcctaatgatcacattatttccattacgttgagcaccacgggcggcgtggtgttgaaagaaataaaccacaatgtcaaactgaggcgttaccgtaacatgtatagcaaacccacggtcgcggacgacgttgattgttttacagtcaacggtcctagcgcattaatggacgcgttggctaatgatacttttaaaacaatccaaggcacagtgtttgtcgaaatttacaggttttgcattaaagagtttgttacgggcgtcattacgtttccattaaagcccgtaaagagcaattattgtacggcttgcaaaaaaaacaaaatgtattaccgcaatccggtgatcaattgcagcaaatgtgggtttaccaatcggtacgtttttaaagggaaatacgattacatttattttcacccagaagcggtacaaacgcatgcggcgcacggcgagctcatcaggtattacgatttaaaattacacgttaaaatttgccgcgaacgcttagacgaatataacaacaacaacaacaacaacaacaacaacaataatgatgatgataattaaattgaaataaaacattttgtcaataaaataaattaattttttatttaataattaataagtacacgcatcaattttgttccactcttcttgtgttttaggttcaaaattggcaaatgtgtgcacacgtagcctatcttcagaatacgtcgctaatcccatttgaacaccgctcatgttataaaattcgctgctgtgaattaaggtgccaattggcgtcgtgtttaaatcaacacgatagcaccgaaaccaatggccgttgccgtcaaatttgctgaccgcaacaaacgttaatttatcaaaatggtcctccggaacaattgtggttaagaacagcaaaatcggcaaattattatagttggcaaatccgtgttttctaaaatacgcgtctatgtcaacgttgtcgtatttttgttgtaactgttgatctatgagctcaaatgattcgtacagatttttgtagttaacttgagcttcgacgaccgcttcttggcgaaacaaataatacaacatatcgttaggaaagttttttaaaaaattgtcgcaaataattttgactagagttttattgcggatttcaccaccattaaaagtgtttgaaagtccagcgctgtaagtgcgagttgaatgcacccgaatcatttcattgttaattaccgttttgtttgcaatgccaaatttaaacccttgtcgtttgtgtactggtccaaacgagtaatatccaggttcaattcgcacacaaagaggctcggcaatgtcgctgatactgctaacgtacataaaatcttgagaataataaaacaagtgtccttgtgttaaagacatgattttgttaccgcaaattgcaactcattaattttacttgcaatagacgagctattatatactaaaatgaccattaacgtagcacccgttttaccagatggactgtactcgaaaagcgaggtcggtgctgacgcaacgctttaccagatggattgtacatagcacacgctttaccagattgatcgtacttgaaaaacaaagtcaaagctgacgcaatatctaaaaatagcacacgctttaccagatggtttgtacttgaaaaacaaagtcaaagctgacgcaatatctaaaaatagcacacgctttaccagatggtttgtacttgaaaaacaaagtcaaagctgacgcaatatctaaaaatagcacacgctttaccagatggtttgtacttgaaaaacaaagtcaaagctgacgcaatatctaaaaatagcacacgttttaccagatggatcgtacttgaaaaacataaccggcgctgacgcaattgctaaaaatagcacacgttttaccagatggtttgtacttgaaaaacaaagtcaaagctgacgcaatatctaaaaatagcacacgctttaccagattgatcgtacttgaaaaacataaccggcgctgacgcaattgctaaaaatagcacacgctttaccagatggtttgtacttgaaaaacaaagtcaaagctgacgcaatatctaaaaatagcacacgttttaccagatggatcgtacttgaaaaacataaccggcgctgacgcaattgctaaaaatagcacacgctttaccagatggtttgtacttgaaaaacaaagtcaaagctgacgcaatatctaaaaatagcacacgctttaccagattgatcgtacttgaaaaacataaccggcgctgacgcaattgctaaaaatagcacacgttttaccagatggatcgtactcgaaaagcggggtcagcgctgacgcaattgctaaaaatagcacacgctttaccagatggatcgtactcgaaaagcggggtcggcgctgacgcaattgctaaaaatagcacacgttttaccagatggatcgtactcgaaaagcggggtcagcgctgacgcaattgctaaaaatagcacacgctttaccagatggatcgtactcgaaaagcggggtcggcgctgacgcaattgctaaaaatagcacacgctttaccagatggatcgtactcgaaaagcggggtcggcgctgacgcaattgctaaaaatagcacacgctttaccagatggatcgtactcgaaaagcggggtcggcgctgacgcaaatgactaaaaatagcatgtggcgctgtacagaataagcacaaacatggcagttttaaccgccgtcgacatgactaacgccagccggtacgcaacacacatgcaccggctcgagtttattggccgttggcgtgagcggttgccgcacatactcatagattacacgctgcggcccgcgtccagcgacgacgattattacgtaccgccgcgtttacgcgaccgtgcgctggcggtcaaagtggcctttagccggcgcggttgcgacagcatgagttgttatccgttttacgaaacaggcgttgtgtccaacgaaacgccgtttgcatacactcaaacttcggaaaccagcgttgcgtacgcgcagcccgcgtgttaccacctcgaccgcgcggcagccatgcgcgaaggtgccgaaaacgaggtgcaatcggccgagtttacgtacacgcccaacaatcaatgcgtactggttgattccacctctaaaatgtactttaacagcccttatttgcgcaccgaggagcacacaatcatgggagtggacgacgtgcccgcctttaacgtgcgccccgaccccgacccgctatttcccgaacggttcaagggcgaatttaaccaagcatattgccgccgttttggccgcgacctcatgaacgggggttgttcgtttcgatggtgggaatcgctgataggttttgtgctcggcgacacgatttacgtcacgttcaaactattggccaacaacattttttccgaactgcgcgactttgattacacggcaccttcgccgatattgccgccgcgccccgttgtcgactccaacgccgtgctagcggaatggcgcggtgtgcgcgatcgcgcaattgattgggactttgaaaaacaatttcgtgaagcgccgacgttgcaacaactcggcatggaaatagacggcgaattactgcaactgtcgtacacggccgaaacggggtttagtaaaacgcccattgcgtacgtagcgcgcggcgcgccgcgcgttgccaacgacacgcgcgctttcgcccgttcagttgatgatgaaagtttagaagcaattattgcttcgtttttggaggattattcaatcgtattcggcatcgcaaccgacatcggattcgacatgctcatgactgcgttcaaaacaatgctgaaaagagttaacactgcattgatacccgcgctcaggcgcgtgctatctactacatcgcagcgcgttacggtgcgtctgctgggcgagacgtacaaagctgcgctagtgcactctatgaatagaatagctatcagaacgttaaccacggcggccaaagcgctaacgcgcattgccattaaagccagttccgttgtgggcatcgtgctcattttgttgacgctggccgatttagtgttggcgctgtgggacccgttcggctatagtaacatgtttccacgcgaatttcccgatgacatgtcgcgcacctttctcaccgcatattttgaaactctggatgctaccagctcacgagaaattatagagtttttgccagaatttttttccgacattgtcgaaacagacgacgacgctacttttcaatcgctgttccacctgctcgattacgtagcggcgctggaggttaattcggacgggcagatgttgcaattggacgaaagcgaagaaattaaagatttcgacgaggccacattggtgggtcaagcgctggctagcagttcgctttacacacgccttgattttatgcagtacacgtttagacagaacacattattgtcaatgaatagaaataacaacaaatacaataaagttataacgggtttattcttgtttaacacaggagtggccatggcggcttttgtcgtacacaaagagtttacgttctttatttatttcgtattgtttttaatgattgcattttattatataatcaaagaaccctacgaatattttaaaacaataaatttgttattttaacgcccacttttactgcgagtcttgtttaaagggttgtcgggcaatggcaaaggaacgtcgggtacatctggaatttctgcgccgcccagtatatcttgaatagtagttactttaatatctaaagcggcgagttgttcggacaacccgtccaaaggttgcactttaccgtccaattcggtcaattgcgcttgcaatgcgtccacttttgcatcgacatcttgcacggcggtcaaaatttgttgtaaaatgctaggtttagacataatgaatattgaaattgttaacctaatataataatagtttgtgaaataatgcttattaaacgctgcgaaccacaaaaggtccaggcagccgccagtgcatcagttcaaatgcgttcctgttaaaagtaatgcgcacttcagaatcgttataaaatagcatacacgactcggtcgcttcaccgcgtggcgctgtttgggataatgcgtacgctttcaactggtcgtacggcaactgcactgttccatacacggaccggccggcgcgcaaacgctcagcgcgcacgccgttgcgaacgtgcgcgtgccccgacacttggcccgattcacgcacgcccgtcaccggcacaagccaaacaccgtcggcacgctcgtacatagttgtcaccactgacactagcctgtcgtcgcacgtgataggtgctccaatgcacaaatgatcacgcacttctttggacacttcgagtgccggcagaacgccaaacacgaatcgcttgttgcacacgtgatagttaaaacaagtggtggtcagcgtccccgaatatgtgccgctcgaggtaaacacgtctaccgtcaaaccaagggacagttgcggaaacacaatgtccgtagccacgccggggaattggtgatattggtttaaagtttcgtcaaaaacctcttgaccaggctcaaacactttaacaaacacgttgcggtcgttcatttgcaaactgcccgtgtcctcgtcgaattttacttccatttgaacgtgcattgtgtttgcgtgacaaagtggtaatggtaataaatttttgttcgtgtttatatgtattgagctttgagtattgatttacaattatacacgttgtgtacattgcgcgacttgtataaaagaacgcgcacaaatatttatcatttagttaacagaaaacggtttgatgagcatgaaaacaccgaaaataacagtattttacgatgacgaagaacaagaatttgtgcacttgtcttgttatcggtcggatattttcaacatggacttgacgtacaataaacaaatgggcaacgatcacgttttaaaagttaaagtaaagacgggaaaaaaagtgttggccatttttaaatttggccaaaaaacaatacgtttaatagattataatcccacttttgatggcttctatgactctactacacaccgaacaaagcaatttaagctgggggattttaacgtgattaggcaattggtgcaaaatgaccaagagcaagtaaacaaactaattgatcagactcccgtgcttagcattgtaataaaagagtggatagaagaaacaccgcgttggacaaaaaaccgtttagtaaccgacggagggtttgacgaagtcgacaaaccagttggctacgaaactcagaagctgaataatactgattatgttaaagttcaaggtcgagaagggtcaattcttgcaaaaataaaaattacatttgtattaaaaaaaataaacattaatgttgtgtaaatatatattacaatacattttaatttgttttatttacattaatcattgttaaatacgaacacataggagagtggtgttgcgacgcaacgcgcacgccgcaacaaaaggttttaatagcgccgtcggcgtcggcgtaatagccttgaacggcaagcgaacgcgcattgttgcgctcgctactgttaagtaaactagcgtaacgtttgttgtagtccagaaaaaaagcgtttttcaaattatgtttttgcaatgccgacccggtgcattcctcgtgagcgcgcgccatggccgtttcaaacgccgcgcgcccgtccagcgtaaacccgtcgcaatacgcgcatcgcaattgcccatacgacaaatacaatccgcgatgcactaacgcgtcaacctgcgccgcgttgtacacgtggtcggcggcgttttgaacaaacgaggcgcggcgacgttcgccgcggttaaactgggagcgccccgcgttttgcaatgcaaaagccacaaaagcggcactttccgtcgccgtttctttgttgcaaaaatcgtcgtcgcgcggcaccgttaacgccactaaattttgcttgaatcgcaccacgtaaaaacacacaggcgcgttgcgcatcacgtacatttgccgttgcatttgcctgtaatggtcgtgcgtcttcacaacttcaaattgtggtgggcccgttttattgacgagcaatgcagtgtgcttaacgcggtacttgcggttagccttgcccaattcgaggcgcatttgatcaaccgtggtgtcacggtaactaaacgggcatttaatctctacgggcacccacgagccgtcggccatggcaaaataagcatcgggcgacgccgaggttagacccaacgcgctaataaacattccgcaatttaacacaatttctgccacagcgcacccggcacgttccgcggcaagctggcccagccgcgcaaataactcgacgttgtccattttgactttgttttcctgcacgttaccaaatgcaagagcgggcgcacgaacaccagcgttgccggacgaccgcgaggcggtgctgcggtccaaacgcaacaagctccacaacgcgtttgtgctttggccacgcgttgcaacttctacacgtagggcttcttcgcgcgaaactggcgctgggacaatgactcttttgtggcgccatgtgtccagctgcgcgggcgtcaacgtcaaagaccgcgcgtaagcggaaaatttgtatttgtcgtacacgacgtgctgctccgccgtcaacgaagcgtgcatggtcgagcgcggcgttatatgttatgcggcgggtagcggtggtggcaacggcaaattcataaacgcgtgcattaaatccagcggcacggtccaatttttaaacggcagtatatttaaaaatattacacattttttcaaaggcaacaattctattaattgttgtggtgacaagtatagcgacaaaattaattgggcatcctctctgtcgtatatggcggtttgcacgttaaaaattgtttggtcgtttatgtgcacgcgaaacgacgcaacgtttggcaacgcgtttgataattgtcggtttttgtttttaaataacaagtctttgtttatgttatcacaataaatttttaattcgttagttggactttttttgtatttaatggagtatgtgggatgcgcaaacgccaccacaaacgtttgtttttgttcaaaagcaattttgtcgctaaaaatcgatttttgccgttttaacatactttcaagtttatcgtttaattttaaacttctttgataatcaacaagtttgatgtctatgaatccagtgaggcgagtttctttgttaaatttgtcaacgtgtcgtttgccaaatttgcccgaggccgctttaaactggttggagcgttcaattttaatttcagtaacgccggcgctcggagcgtcgctcggtcgactgtaaggttttgtggtttcagtgacgccggcgcttgaagcgtcgcttggtcgactgtaaggttttgtggttttgggcatggtcacttatttgcggacgcccattaaaatgcttcttatttcggtcaccaaatccaacacgtcgtttagtttttgactgtcggcaggacttaagcccccctcaatattttccacagcattcagtaagttgttcaacgtgccatttatgttggttatgctggacgctaagttagttaaaatggaattggtgttattaagttcgctgcgcagcgtttgcgacacaccgttaatagcgtcaatcagttccttggccaaattgtccagttgaccggtcaaatcgggcagcgcgtttttaatttcgtcaattagcgcgttcaacctgaccaacaatgcatctttagaagcctctattgcggctaatatttgagcactctgagtttttaaagtatttagcgcgttggacagctccaaaaattgactggattggttgagcgaaatttgatttatgccgttgacaagtagatcgttttgatggccaattttttccaaagcgtccattatttgccgctgcgcacaatcaaacgggggcggcggcggcggcggcgggcacggaggcgggcacggacgttggcggctgcaataactcatatagttgttggcgataaacgtggtcagcaattggtcggaaaacaacgagggacaccgcaacgccaacactgccgctccgtaaatgtcgaccatgtacttgacggtgttgttgttattgttgggcggaaaggggcacgacgtgccaatgtcgttgatcattttgcgatgtttagacggaatggaaaacaaaatttgttgaaacgtcgattggggcatctttagattttgaaaaatatattcagaatctatccacataaccgacgcgtcgtcgtacatgacgctgttgttgggtatcatacacgatgtcatattgattaatattgtagacgcagcgcaaagtttttgataattacttatcagacaagtgccggcgccgcgtgttttgacaacaaaccgttgactttttcgtcaaggttggcaattttcttgttgttttttgcaaccgcgtcccatgtgcggactgtgttgttgtgtaaattggacaacatcatcaacgtgttagtttttagcgcttcaatctcatctatcacaccgctgtagtgcttttccgcggattcgtaagccactattaaaatggacttgacttcttgcagttcaccgttgaggtgccccgagtacactaggtaccccaccaagcacacactaaaagcagcccaaaagttcatgacaaaagtttattctacttattgagacacactaggtctttaatgcttttcacgttatctaaaatggtgtctgtggcaaacgtcaattttttgctatactctgaatgtaacgtttcagccaactcgcgcgctgcttcgcaagaggcgacaggcgcggtctgtgcagccgcgtgcttgtttaatgtttctattgcttcgtttaaactttcttgaataacacacagctgtgttttaatttcacacaacggatcgaacgcgttgcactgtacgcccattagtaaatcacaaattatagatttgatagtgtaatactcagacggatgcgttttagtgtttaaattataatgttgcaaacacttaaacagcccaaacacgtgcaaatagtttttgttattttttgtaagtttgtgcgacgaagccgcgttcgtccacagccacaaagcggttacatttttttgaaatcgcgccaacaagctcgcagcggcgcccagttccaagtagccgtcgtggtcatgcggcgcgtttgtaataatgaccacctcaaaactattgttaggggtataagtaaacgtgcgcgtgtcgagcgaattaggatcttccatagcgcgcgtcttacataatacgtagggggcacaaattagaaacgtgtctttcaagtaccatccatctggtaaagcgtgtgctatttttagccattgcgtcagcgccggtttttcaagtacgatccatctggtaaagcgtgtgctatttttagctattgcgtcagcgccgacctcgcttttcgatcacgatccatctggtaaagcgtgtgctatttttagctattgcgtcagcatcgacctcgcttttcgagcacaatccatcgggtaaaacgtgtgctatttttagctattgcgtcagctttgactttgtttttcgagtacaaaccatttagtaaaacgtgtgctatttttagctattgcgtcagcgccggttatgtttttcaagtacgatccatcgggtaaaacgtgtgctatttttagctattgcgtcagctttgactttgtttttcgagtacaaaccatttagtaaaacgtgtgctatttttagctattgcgtcagcgccggttatgtttttcaagtacgatccatcgggtaaaacgtgtgctatttttagctattgcgtcagctttgactttgtttttcgagtacaaaccatttagtaaaacgtgtgctatttttagctattgcgtcagcgccggttatgtttttcaagtacgatccatcgggtaaaacgtgtgctatttttagctattgcgtcagctttgactttgtttttcgagtacaaaccatttagtaaaacgtgtgctatttttagctattgcgtcagcgccggttatgtttttcaagtacgatccatcgggtaaaacgtgtgctatttttagctattgcgtcagctttgactttgtttttcgagtacaaaccatttagtaaaacgtgtgctatttttagctattgcgtcagcgccggttatgtttttcaagtacgatccatctggtaaagcgtgtgctatttttagctattgcgtcagcgccggttatgtttttcaagtacgatccatctggtaaagcgtgttctatttagctattgcgtcagctttgactttgtttttcgagtacaaaccatttagtaaaacgtgtgctatttttagctattgcgtcagcgccggttatgtttttcaagtacgatccatctggtaaagcgtgtgctatttttagctattgcgtcagcgccggttatgtttttcaagtacgatccatctggtaaagcgtgttctatttagctattgcgtcagcattgaactcgctttttaagtatgatccatctagtaaagcgtgtgctatttttagttattgcgtcagcgccgacctcgcttttcgagcacaatccatcgggtaaaacgtgtgctatttttagatgttgcgtcagctttgactttgtttttcgagtacaaaccatctagtaaagcgtgtgctatttttagctattgcgtcagcgccggttatgtttttcaagtaccatccatctggtaaagcgtgtgctatttttagcaattgcgtcagctgattgcaggttttatcaacgcgttgttgtttttaaattgcaagttatcgtaagataagatataaaatatcgcaagattaagcgtacgttgatcaagtcacgtaggcattaattaatcgcgttgataagcatgggtatataaagccctgcactgttctgataaatcagtcgtgttgtgttgtctcacaagaacactacaagatgttaagaattactttattaattctgtttttggttcggtttgtgtcgggcgccgaacattgtaacgcgcaaatgaagtcgggtccttggcgcattaaaaatttgcctattgcgccgcccaaagaaacgctacaaaaggacgtggacgttgagattgtcgaaacagatttggatgaaaacgtcataattggctacaagggttattatcaagcgtacgcgtacaacggcggttcactggaccctaacacaagcgttgatgaaaccacacagacgctgaacatcgacaaagacgacttgatcacgtggggcgaccgtcgaaaatgcgaagtgggcgaggaattaattgaccagtggggcagcgacagcgacagttgcttcaaggacaaattgggccgcggtgtatgggtggccggtaaagagttggtaaaacgaaaaaataacaatcattttgcccaccacacgtgcaaccgctcttggcgctgcggggtgtcaacggcaaaaatgtacacgcgcctcgaatgtgacaacgagacggacgattgcaaggttaccattttggatatcaacggcacggttatcaacgtgacggaaaatgaagtgttacatcgtgacggcgtcagcatgattcttaaacaaaagtccaccttcaccaggcgcactgaaaaggtcgcttgtttgctcattaaagacgacaaatccgacccgtattctatcacgcgcgagcattgcctcatcgacaacgacatttttgacttgagcaaaaacacgtggaactgcaaatttaaccggtgcattaaacgccgatcggagaacgttgtgaaaaaacgcccgccgacttggcggcataacgagccaccgaaacacagcgaaggcaccaccgccaccaagggtgatttgatgcacattcaggaggagctcatgtacgaaaacgatttactgcgcatgaacctcgagctgctacacgcacatatcaacaagcttaacaacatgatgcacgatttaattgtgtcggttgccaaagttgacgagcggttaattggtaacctcatgaacaattctgtttcttccacgttcttgtcggacgacacgtttttgctgatgccgtgtactaacccgccgccgcacacgagcaattgctacaataacagcatttacaaagagggaaggtgggtcgccaacacggactcgtcgcaatgcatcgatttccgcaattacaaagagttggccattgatgacgacattgagttttggattcccacaattggaaacacgtcctaccacgaaagctggaaagacgccagcggctggtcgtttattgctcagcaaaagtccaatttgatttctactatggaaaatactaagtttggcggacacacgactagtcttagcgacatcggtgacatggccaagggcgaactaaacgccacgctttattccttcatgttgggccacgggtttagttttttcctcataataggcgtaatagtgtttttgatttgcatggtgcgcagccgcgtacgcgctttttaattgatttgcaaataaacatttattgcaaaaatgtatgtatatatatgtaatttgatttaataaatttctgcgcttgcaagcaattcatttcgtataccacaagcgtttatgttttgttgcaccctaaaatatccctgctctccccaatcttcaccccacgtgtttttaagtatccaataaggaacgttgttttcaacgccgtatccaaccaacagaaccgcgtggttgagcccgtagttggaacagtatcgcataatgccacgtctgtaatttacaatgtcggacgcgtctatagcaacgggaatagggcctacaatacgcagcaagtctttcaatttttcttcaaataccgcaatgtacctgtaacattttttcaccttaaccacaaacttggcaacgtccacgcgacaattgccgtcgcttccttcatacggataatcattttcggcttgcacgccacccatttgcataacggcttcgtatgctgtgtgcaacaacccgccgttgcaacccgcgtccacataatcacagtctatgagttgttgttcggacaaatttatgagttgattgtgtttgatagcaaactgactctctaaactggcgagtgtagcaaacgcccaacatgcgccgcatatgccttggttttttacgctagtcactttgtttagacgacgccagtcaaactctaaaggtcctttatcgggcggacgatttaggaccacgacctcgcaaaaattttgcgtttgaagaggtaacgccagcccggtatacttggaaatggtctcgtctttggacagatcagaaaatttgtttatctcatattgggccgtggtgtcgttttggttttttattataatttcctctaaattgtgttggaatatttgaaaacggcgcaatttttcagattcgctgctataatgtttgttgaatttatgcaaaaaatcctcaaaataactgggcgccttcaaaagatcgtacgctgcgctatgcgcaacgcaaaacaccaataaacacaacacaattttgttcataatgttacatttaattaatataacttataagtacaaataaaatgttaaactatttggtcagcattttgtgggtaacggcagcgctttcatacgcgtcacccggcacgcccgtcattgattgggccgaccgcaattatgcgcttgttaaaattaacgccgacgccaccgcttacgaaaatctaatagaacgcaaagaacaagtaaacgtgcaagtttcttggaacgtttggaatggtgacgtgggggacatggcgtacgtactgtttgacgacaaacaagtatggaaaggcgacgccgccgctaaaaaagctagcgttaacgttgtcaaaagcgggcaatttggcatgcgcgtcaaattgtgcgatgatgacggctgttccgtgagcgaaccggtaactgtcaaagtcgccgacacggacggcggacatttgcttccgatggaatacgtttggcaagaaaacaacaagcccggccggcgcgcaaacaagaccgtcgctgcgtattttgtagaatggggcgtgtacgggcgcaatttcccaatagacaaagtgccgttgcccaatttgtcgcatctgttgtacggatttattcctatttgcggcggcgacggactaaacgatgccctcaaaacgataccgggcagttttgaggcgctgcaacgttcgtgcaaaggccgcgcagactttaaggttgccattcacgacccttgggccgcaatacaaaaaccgcagaagggcgtgtctgcgtggaacgaaccctacaaaggcaactttggccaattgatggcggccaagttggcaaaccctcacataaaaattttaccatctattggcgggtggacgttgtcggatcccttttattttatgcacgacgcggaaaaacggcacgtgtttgtcgattccgtcaaagagtttttacaggtttggaaattctttgacggagtggacattgattgggagttcccgggcggcaaaggtgccaacccggcgctcggtaacggggagcgcgacgcgcacacgtacattattttgttacaagaattgcgttctatgctggacgaccttcaattgcaaacgggcaaaacgtacgagttgactagcgcaattagtgccggccacgacaaaattgctgtggtgcaatatgaagccgcgcaaaagtacctcgataaaatatttctcatgagttacgactttaaaggggcatggtctaacaccgatttgggctatcagaccactttgtacgctccaagttggaatcccgatgaattgtacaccacagatcacgctgttaaattgttaacaagtcaaggtgtagcttcttacaaaatcattgtcggcatcgccatgtacggtcgcgggtggacgggcgtggctggttatgacggcgataattttttttcgggtactgcgaaaggccccatttcgggcacgtgggaaaacggagttgttgactatcgccaaattaaaaacgaattaaacacgtatttgtacaggtttgacacagctgctaaagcagcttacgcttttaacagtgccaaaggggatttgatttcgtttgacagtgtcgattctgttttggcaaaaagtgtgtatgttgagcaaaataatttgggtggcgtgttcgcttgggaaatagacgctgacaacggcgatttattaaatgctatgaatcaacaaactaaattattaaaagacgaactttgagcagtttggttatgtaataaaaaacaatttatttagtaaaacgacgcgtagtattgcgtcagcgccccaccccactctgtttcatgtgttaatactatatataaatggtatttattttccatacaattttattagtatggaaccgccaaacaaacgctgtaagctttgttatcaagctctgcccatggtgccgcaattgcctttagtagcattgaacaaaatcttgtcgtatttgccgtttgaactgcacatggctgtggcgggagcaaacgcatcaacgcggcgcagggctctccaactaccacatgaccgtcttgcgttgtattttaaacacgatataggcacaaacgacgagtttgcagcacattgggcaattgaggttgacgacccggcaatagcgtatgtgagccagctgtgtcgtttcagttgcgcaataaaagcgcaaaaatttttcaacaaatgcgtgccaaacgcaacagctaggtgcatgttgaatgaaccgcgcgccgcgtcagacaccatgctgtcgcttcgctggggttggtggcggctcgtgcgcgcgctgattcaacacgaatgcaaaaacggtcgcagcagacggccagagcgagtgcgtgtttacggagacgaaatatgcgacgtaacaatttttgatgcatcattgttggaatttgacgcgcagcccgattcaattatcattgtcacgtttgacaacgacgacaatatacaattgtatgtgcacggtaaacgcgtgtatagaattgttgataaacgtttttggaattagcaatcgatgcgtagtttttgtaatttaacaaataaaacatttaaaatttaatatatctgttttattgataactattaatttttggtttttaaataatcttccatttccactgttgcaaacgaaggcggcgggtcgttgagcggcggcatcatttgcacacgttgcaagtttgaaccggcggcttctttgcgcgcggcccacacaatggccgtgagcatgtacgcaacgcttattgttgcagtcaaaagcagattatcacacaacggttcactttttaatgcttctgcgcttaagataatgattaggatggaagcagacaaaaacataatcatcataaagcacgatttaacgtaacggtagtcaggaaaatgatttaacgcgtggcccaacagcacagttaattccacaaacaataggaccaacgcacaacaatgtattaaatttgtaattaacactgcgctgacagcactctgtgcagtgtttatcacaccgtaatgcacaagcgcgttgccaaaatacatagcgtgtaacattttcagctcgtaaacaatctcgtgcgcttcggttttgtttttctggagcaacagcggcgcgttgataatgccagtagccaacagggacaacaacaaccaatattgtaaaaattgcaactctgcaaacgtaaaagcagcagacaaatagcccgcaacaacggcgccatacatacacaatgtcacgtttacgtacgacattgcagcaaatggaaaccgcgttctaatctcgttagacagcctggtgtatagaaaacaacgattgaataaattcattgcgacgattgtgcgcgctcttatattgattacaaaaaaacaagtgtgcgcaagccacagcgcgcatcaatttttatatgcgcgcgtatcttatcatggccaccggatggctataaaaggagaacggcaagtgggtcaggctcattgtacaatgaggtcgcttttgcttttagtggtcctggcgcttctgtcgaccacactggctcgacaagcgctgcccgacccgctggccccgccgccgcgacgttacggtcatttggcaggcgcgcccaaattgttgcgcgcgcgcaattttaatgccgaggaacagaaattacaacagtgccgtgtgcatttacattggcgcaatgattaaacatggcggatgcgcattacataataaacattcaaagcttgtataatttaattaaaactctgttgtttatttttgtgtttatctttgttaataatccactacactccatttcttttttgtttaacatgtacaacacttgcggaatagcaacacgttgttttaaaatttttaaattaacaagtgcaacattcaaacaaaatttagctctatacaaatagcccaattttacaaaagtggcgtgcaacgcgcacgcttctactacttgagcaacgctcatggtcgtgatactcttaaattttatactaaacattaaacccgttttttcagtacgatttatctggtaaagcgtgtgctatttttagctattgcgtcagcgccgacctcgcttttcgagcacgatccatctggtaaagcgcgtgctatttttagcaattgcgtcagcgccgaccccgcttttcaagtaccatccatctggtaaaacgtgtgctatttttagctattgcgtcagcattgaacccgtttttcaagtacaatccatctggtaaagcgtgtgctatttttagctattacgtcagcgccgaccccgtttttcaagtacaatccatctggtaaagcgcgtgctatttttagctattgcgtcagcgccacttatgtttttcgagcacgatccatctggtaaagcgtgtgctatttttagctattgcgtcagcattaaacccgtttttcaagtacaatccatctggtaaagcgtgtgctatttttagctattgcgtcagcgccgaccccgtttttcgagcacaatccatctggtaaagcgtgtgctatttttaactattgcgtcagcgccgaccccgtttttcgagcacaatccatctggtaaagcgtgtgctatttttagccattgcgtcagcgccgacctcgcttttcgagtacgatccatctggtaaagcgcgtgctatttttagccattgcgtcagcgccggttatgtttttcaagtacgatccatctggtaaagcgtgtgctatttttagccattgcgtcagcattgcgtcggcgttgaaaacatacatttagtaaacggctaaactgcataattagaaaatgtttcaagaatttgcgtgagtgcgtctatttgggcgccgctggtcatgtcgccggtgcccaccacgcgtacagtgttgcgttctcgttcgttgtttaagaaaaacccgcgcaaacgcaacgctgccggtgcctcgccgcgcgggtatcgccccgcgcggttccaaattcgtatgttagggccgtcgcggctcaatatgcaccacgaaccggtaaacgtttcggcggtgcccacttgaaagttgccgtgccgacgtatgcaagaatcagaattgtgcacgatacaccggccgcggcccggataaaaacacgccggttcggccgtggcgcgctctctgtttttaaacaaacgaaacaacgacgccggtagttgcgtgttgttaagcacggtgtcgtaggctatcgatatttttaaaacaccgacaccggctagcgttatttcgttcacgtccgggtgcggggtgagcaacgggtacaacatggccgtataacgtgcatcgctaagctgtgaagcatgcgcttgaaacactacgtccgcgtccgccaactcgttttggtcgggtcgcgcccaaaaaaatttgtaatctacatgtcttaagttgagcatgtgcacgttaaaaggctgcaggcacgcgttggccgccgtgcggtcgccacggcgcaccatacccgtgctcgccgcgtgccaattgaacacggccagaagcccgtcggcagcgggacaattgcaaccgcttacttcgacgtcgtcggcggtcgtgtggtgaaacaggcggcccgacgtgcgccgcccgctaattgggtccaccgagcaagggtccaccacacaaatgtcccctagccgaaaatagcgccggaagtaatcgttgaggccgggatggtctaaacgcacctggccgtcgacgcacggcgcgcgaggaaaaaacgtttcgtcaaacaccacgtcgcgcaccgtgcgcggccggcaaaacggcgtttccgtggcggcgtcgtaatcgctgacgtagccgtcgtcgcacacacaacgaatgtcgccaccgccgatgtttgcgatgcgtccgtgcggcgcgcaccccaccggcacgttgcagtcctcgtacatgttgagctgggttacaagcccgggccttaaacagctgcagagcaacgcaaaccccgtttcggtttctgccaacagccacacgcccgtgctggggttacacgaacgtgcacgttcgcggtctagagcaaagcagtaagactcgcccgcgcgaatagtaacattttgttcgttaccgttcgagtcgcgcatttgcacaaccgtgtcctcgtcgaacaactggcagttggctaatccctcacgacacgcattgcaatcagcgtgtgttgtgcacggcgtgaggtttttgtggcattccaaatcgttgccttcgattacaatttcgcccggcggctctattaatggcacgtttcttgtgtcaaacatttgcaacgggtagtgtacgtcatcatgatgcacgtcgataaggttagcgtacacaaccgccgctgcgacaattgccaacaataaaactaggattaaaattaaaatatacattttgcttacgataaataaataaacagtttagggaattataattttattgttaattaaattaataatgtgtgacattccgtggctactatacaaagagggtaaatagtatttatcgctcaatttgtccacaaaccaatctgcgtaaccgattgctttcaaggcacatttcacgcaatcgttgcaatcctccacgtagtttatttcaaataatggacgtgcacaacaaacttggcaccaattgtcaaaattgtacacaactttgtgcagttcgtcattgtcgacgcgtaaatgtttgtgttcaatattttcaccgcagttgtcgcattcaaacacgtgtgttggcaagtttaatttgctttgaccgctttgaccgcacttgtcgcagcgcgatttgtaaacaacgctgatgaatacggcgtcgtcgcatgttatgcgataactaaacaatagttttttaaaaatgtcatcggtcactggttgccattcgcacaatccaacgtattgcaactttgttgtaaatgctattgaggctctgtccaacaacatgcgcaccaaactttttttcatacttgcgggtaatatttgcatgtatttccaaaaatgcgttttaaaattatcactgttgatgactgcatcgctaaccaagctttgcaacgattgcggcgaaatcaaaaacagttttctaattgcgtcggtttttgtttccatgctgactactaactatgaattgttagtcggcaaaatttacattatattgatttacaatgtggtgcatttttaaacgaaacaaattaacgctttccgcactcaattcggcgctttccaaaacttccaattgcactttttcaaacgtgtctttagtgtgcacaatttccgacggacatttaattgtgtcattggtcaacactagcgccaacgaatctcggttgtagcattgcaattgttcaacaagaaaacacttttgcaaattaaatacgtaatctaacttgttagacacgtataacaccgtggccgttggtggcatgacaactgcggagcgcgggccgacgtgtgttatatatgcaccgcctacggccgtttcacttttttgttcaataatgatttaaacatggcggccacttcaatagcgtcgtcttcggtttcaaacaccaagttgcgtttgttacgcacgcgcattttgtccttaaattcggtttctacatggttcacaaggttgttaaagtccacttgcgggttcggacgaaccgaatcgatgactaattcggccgcggcgttcaattcgcgcttcattttggtcacatgcactttttggcccgtaatggcgcgcaaacagttaaattcgcgcgccacgcacagcatgggcgtttggtgggttttagcggggtattgcacggcgcgctcggccaattccataagattgccgtacaactcttgaatgcgcctgtccttgtcctcgagcatgttaacatatttttcaagcaattcattattctttcgcaattgctcatctttaatttttaattgattttcaatgctggtcagcagcttttcaattggcgtaggttcagcgcacgacattttcgggcaagcgcactgtcaaaataactaactaagtatgccgaccgtgtggcaattgctattattaatcgttattgttgcaattgtgtacgtttacgcgtttggctttgtgcggcaatttgtgcaagaagacgcggtcgagaagcaacaagcggcggcggcaccgttaatggagtttacgttccaacgtgctcgaggcgtagactgcgcattaaatcggttgccgtgtgtgacaaatcaacagtgtcgcgacaattgcgtgattgcaagcgcggccagcaatttagcttgtgataatgggttttgcagcgccaataacggtttggagggagcgcaacctccggacgccagggttgaatgtgacacggcgttggggctgctgcgtgtttacgcagccggcggagatttcgtcgtcgctcaaacatgtgtgagcacgtacagagacttagtggacgacacgggcgcccctagaccttacctttgcgacggcggcgcgttacagttaaacttggacacggttcagttttccgccgacgcgtgcacgtgcgccgccgggtacgaaaaaatgttgtttcgacaaactgcgttggcgcgagccgtgcccgtgtgcataccatcgcgcatgtcaaacctgtaccgacgcgtgtacgtttagcggccttgcacttttatggattatgaatagtttcaattgttggcgtttgaaggcaatatgtataagagagttagttatggcaactcaaatgccgtattggtttgtgcaacaaatggtggtaaacgagttggaatatttgtctaccaatgtcaatgacgacggggcgggctatttcagctttgaccatttaggcgaccggttgcaaaatttgataaaaatgttatcaaatttagacatgtcagatgcttatttgcaaaagtatgacattaaaagtttagaattacttattgacaatatcaataaaattgattatacacacagtgaggaaaaaaaggaagagcttaaacagcggttaacaaatttgttgcccaacggcgatctcattgtgagcaaatatgacaaagaattaaacaaagtgttaaactttagttataattgtgaaataaacacgctaaataatattgaaatgtcgcacatgaagttggcgtgtgtgttgtgttacaccgctttgttaccgtatagaaacaacgcgtggtatttgccaaacaacgaacatcaacaattatttgcggccgcgtttggcaattatttgataaattttttaaacatggtaaaaagcaaagatgggtctttgaacaaaaccgttcgcgtaatgtatcacgttgtaccctctgtgcagctcaccgagccatatataaatttgaaagatagaatgaatgccagtttgattgctgtccaaaatgttagcaacgcgcaataccaaaacttgcccactgacattgaagtgtgctactcgctcaacaacagattgtatttaaacaattcgggcgaccagcaaaccgacatgtgtgcggaatatttggaacttaacgccgtcccgtactgtttgtacaattcaatgttacctgacaactttgctatgagcgtttttaatttgtacaaattgcacgaagccaagaaaaagttgcagttgggcaacgtgttgtttgtaaacgtgatgcgcaatagtgctaaagaaacaataattaatactatgcgcacgtactattccgcgtgccagaaaatgaaaaacaataaaatattacgcgtggtgggtaattttaaaggttcgtttgattacaagtttgccgcgcttgattttgccatacttgcactggtaaccaatgctaccaattgccaattgaaatatttaactaccagacatgaacaaatgtttatggatttgaaacagcaaatttgtcggctgacgccgcaaaaagtgtacaacgtgctgctcaactacaaaattgacaaagaaccgctgactaattttagcaaagacgcggtgcaaggtgtgttttagtaaataaaattttttataatgtttttatactttattgattatgtcgtccaacgcaattttcacatttctaactgaatacgtcgcgtcgtcgtcgaacagcgttttgacagaagcattgacgtgcgcacgttccaagtattgtgcggcaaacgcccttgccttttccgcgctaaatggttcgtacacaaaaagtttattgcccacaaacgagcgcagccggctcaattcgccttcttgcaaaaaacgtggtcatgtcgatgcgcgtaaacgcgagcgcttggcgaaaatcgtccgcgtgttcgtaatgcgttaaattggtctcgatgcgttttcggtccgcccagtaatcgtgcattagcatttgcgcgttgtttgtcgtaaaaaccagcacgcggtttgcgtttttaataaaacccgtgtactcggcaaactgcgtgatgcctttttctcgcatgtcgtcacgatgcatcacgtacgagtccaattcatcaaacgtccacacgatgtagcacttgccgtctagcgcgtcctccaaccggctaatcagcacacccgcgtcgtttatgttaccaaacgtgttcattggcacagaaatgacaatcgtgtcggcgaatcggctaagcgctcgaccaagctgaaagctggcgtaggttttgcccaggccgtggccgcccgcgaacaaaaacacgttgctaatgacgggcgggcgaggcaactcgtacaattgtgcaagatatttttgatatccaatgctagccggacaagccgaaaagtactttacgtcggccgcgtcgacgacgcgatccgtgtgcgcaaacgtgttgacattaatcatcacgttgttggagcgcactattagcgggtaagtaaaatcggcgttgtgtccggcgttgagttcggcaactattcggcgttgcagctgttcgtggttgtttagttgcgcggccacagaacgcgaaattgatgtcatctgttcgttgaccacgacgccgccgtagcaagccaacccaatggcgagaacgacgcttgcaaacgtcaaccaaatcatggtccattgcgcccttttaatgctgaccagttctctgaacattttgtatgtgctcgtgtactcgttcatggtgaattgctccttaaatacgaccgaagagcaatgtgtcgtttaatagactgttgcaatttagccaattagttatggaaatcacaaacgcttccgcaaacgctcttttgcaacaatttaaattggaaaacgaatgggacgcggacgtaatctcgttaaacaatttttacgttcacgttttggaacacaacgaaagtttgtcggccaaacaaaaggctgctgtcatgcaagatgtgtgcctaattgttgacgcggaacgggacaaaatggaaaatttagcggtttggctgttggagtatcatcgcgtttgcggcaattgcaacgcgctgcacgcgccagaatattacacgtacggcgatttgttttgtcgcatgtgcggaaacagtttgtgcgtgccggccgctgcaatgttggacttatacatggcccgcggccctccaaacgctaatgttttgttcgacgagtttttggacaagatgcattgcgcgtattgccattataaaagcacggcgtaatatttttgtgctatagtgtaaaacatggactcttatacaatgcagcatttttacaatgaagagcgcaggccgctcgcggtcactacactgcacgacggcaatatttccgagtcggcttacgagaacgtcacgtttatacgcaaattgatgtgcaaggaaaatgttacaaacgaacacgagtatcaattttgcaatgacaacgattacaacaaagaaaattcaccagaaaaaacgcaacaataaatttatacatgtaatagtctgttttttatttaccaataaggttaacaatgaaatacttcttgtccgccacctttttaataattatatttttatatgctatttatttttgcgtggtaattattgtaaacaacaagcgcgtgcaacgcaatttgttttaccaatacaattacattccggcctcgctattaaacactgttaaagtgcacaatataaaatggtcaaatcgtaactatgatgatgatgatgatgaatattattatcccgaagaaaatgtaatgcaacgatgcaaagcagcttcatttcctgtcggcggctttggcaacattccaagtcttcttttttgtaacaaattttatatgtgcgcaggtccaatatacctacctagaatttgcacacatggccatgtttttaatagagacacgcaatcatgtgaacaatcctttaacgtcgattgtcacggcttgcccatataccaataattttaatttaaccaaagcataaaaaaacaagtaccacaacaattttaacaattattaatctcatattgataaggcttactcgtacatcgccatggagtgcccatttcaaattaaagtgtgggtgaataacaggttttttgtgtttccgtacaatttggtggagccgcagagcgacgtcggcaacaagcccaccgaaaaccttatcgtgtacgtgcccacggacgccgacgtgctgtacgtcgaaaaacgcaattttccgaggtttcgttcagtattagtttataaacatgaacaggactacaacggcaatagccaagtaccaaaaaaaacaggcgccgccacaattgtgtactggaacccgcttgtgcccattacggaaattggcgctggggaaactcgcgtgtttagcgtgttgttgaccaacaatttgttttattgcaatacgctaatagtgcaccacgaagagcctacgtgtcctatcgagtttaattatcccgagctcgaaatgcagccgtcgtgcaagttgctagcaaagtctaaaaaacttgtagacttgcgcgcgcacacgtcgccgttaaattacagcgaattgcgaccgatcaactgcgagttgcctttggcccattttaaagagctaatggaaagtgacaaatttttattgtgcttcaatttggaaacgcccacgatggtaaaaattttgtgtttaaaacgcattttttgcatttttgaatttcgcaaaaagcccgcccggtatgtgatcaacttgccgcacgaagaaattgacagtttgtataacaaactcaattgggagcgaactcggcggttgttgcgcggtgatttaccgtccaattgcgggaccgtcaaccgcgcgagtttgcagtacgtcaaagacgcgcaaacgctgctgcacatcgccaaatgtagccagactattgtcgagtttgtgcgcatttttcagcaattgatttttccatatcaaatagtgcccgttgttattgttaaacttaattcgctcaataccaacggtcgagtggcaaacgttgaacgaatgcgcgttttttgcaaaaacgacagtgtggctattaccactaaaggttgtgtgcccgtcaacatgcccgacttggctcccattaccacttttaacaacaccgattttgacgatattacacatttaaaaagaatcgccaaccgcgtggctgtcgatggtgttttttccagcggcgttaccgtgcacgccgtaaagtacaattactttttgtaagacatgacgacgccgtcccaagtggtgtcgcgtttgactggcggccgcgctggtaaccccattgtagaagttattcgaaacaaccccacacccaccgacggcgatcagcttagccagtttgtaaagcgaaaccgggcgttgattaaagagtttgtgttggttgtgtgcggatttttagtgttcatcatgatcatattgttttttacgctgttggtcgttgttatgaacaacgcgcacgctgtgcgaatacagcgagcgcagtttgagcgggcgctattaaaaaattacgcgcctccaaacgcgtaagctgttgcgttacaatttaaacaatggttgctgcataagcggttggtggcgacgcggttttgtttgcggcgcgtgatccggcgtttgtgcggcgcttgattgggccgttaatttgagcctttttggttggggcggtttgaactctcctagtttgcgtttgcgctcgcacatgacatcgtttaacaaaactgtggttgtcgtttgcggattggtcacggcgcgcagcgcgtccgcagcgggcttcgtggttgtcaattgaatttcgttggtgctggtgtagctaaattcaaatgcctcgataaatatttttgtggccacctctttaccgaacgtgacaagatgatgttcgtcggtaaccgggctgtccaaattttctaaacattcgttgtagtgctgcaacatagcgcgcggtgagctcttcaagtcggggtttattttgttgagtcgttttactgccacttcaattagctccttgtacgacggaaaataaccggagctgcgatttaatgcaaatttaaacacgatcaaaagcacgcgtctgttgaagtttttgtagtcaattgaatcgtccatgtacttggtgcgcaaaaacaattttttaacatattcataatttttaggggacggctcttcaaaatacttgtctcttgcttgttttacaacatgcaaaatgttggcgggcaacaagctttcattttcaattaattcgctacatttatccgtgattagttggcgtgcaaaagtatcgacgtctacgaccctgtagtgggtgtccattgggtcaaacgtttaacaatctcttaaaagaacaagtttaaacaaaaattgcattaatgcgaaactaacaggtctatttacgcgtaaaaacgttacgtttgtaaaaatgttaattaaaataacgacgcacaaaaactaaggttttaagaaaatataattaaattaatgtgcgggcggcacgtttttgcgcacttgtggtttaacgagagtttcgacacagctctatattaaatactttaaagtttaatgtttggcctgaattctttgaaaagatacttaaatcaatttccaatttgaaataagattacaaagcttcaaacaaactgaagtctgtttaaattttgacctgtaaaaagttcaaaaaggttaagcagtcaaatggtgtaattggatttctaaatttattatgtcacctgtgaaaagttcaaaaggataagcggtcaaatggtgtaattggatttctaaacttatcatgtctttattacacaaaaacaaagggtattttgtacacaaacaataaacaatatttattttataattgtaacaaattatgttttattattattgtttaaaataaacaatttatattgtacattgtgtttatattacgttaaaatcggcattcattaattgaatgaggcgctgcaaatgcttggggtcgcgtcgattgtcagtttttaaagttgtgtcgtattgtagctcgttaaacgccagtttgacgatcttgtcgcgcatcaccaacacggtgtgcacttttatgttgggttgggccaacattggtaaagtgtcaatttttccgaaaaaagcttgcagatcacacaaaaagttaaatttgataacaaacataacgagtgaatctatttgcgggaacggtccatatttgttaaaatcgacgcgcatgttaccaaagtttttagcgcagttttgaaaataattagtcgccgcaaatatgtagctaacaatgcggttcgattcgtcgtcgtacaatgtcaatggatacaacaattcataaaaattgacagtcatttcaacatggctaagattatatgtgtttaagcgtcgcaatagttgtacaaacgtaacggctgagggtgtgccgcttatggtgtttttacaattgcaataatcgtatgtttgttgcatggctttagtaacttgcacaattttttccatgcgctcattaacaccggcatatttagacaattctaacgctttaaggcgcaaatagtttttgtcttcttcgcgccgacgttttcgagccaattctttgtcgggctcgtcctcttcggacgaatacatttgttgatttacattttttggcggatcttcctcttcttctgacgacaactcgggcagcggaggcgcacggcgcctccgccgtcttgtaaacccgccaacagtggaaccgtttgatgatgatgattctttttgcgattgaagtgacaaatcgcttggaaacatttctctaagtttttcttcccactcataaactggattgggagtctgcattggttgcaagttgggcgtttgctgtggtgattgccagccttgttccggcatgggtgtttgctcagtgtacgccggcgtttgctgtggtgattgccagctttgctccggcatgggtgtttgctcagtgtacgccggcgtttgctgtggtgattgccagctttgctccggcatgggtgtttgctcagtgtacgccggcgtttgctgtggtgattgccagctttgctccggcatgggtgtttgctcagtgtaatctggagcgttgttggcacgccaaacggcttttgcaaaattgcgaacatcatcaacgctctcgtgggcagcagtgtaatttaataatttcctgttgttacgattaatgtaatcacttagttgtctaatgttcaatttatcaaaatcttgctcgtttctaatgacgggcggcgacgcaattatttcttgttgcaattctttttcgccggttggcggcaatggcgtttgaaccatttgttccaacgacggtttttctttttctgtgcgtgacggagcttgcttctcggcgtttttgataaacggcaaaatgttgttatcgcgcaattcgttgtacaaagctgaagcattgtttaaaaacccttcaataaccgtctcgtccaaaatgtcctttttaacgtgtgtttcataatcattgagcaaattttgaattgtgtttagtgtaacttgaggcgcaccaaccatcaatgcacgccgcaaaaacgccacggctatttgcaaaacgcggtggcgcataatgctgtcgtttgctattacaacgctgttaatttgacgttcgttttctagcaaagcgccgggctttagcgagtcgacgaacgttttaatggcgtcaaatttttgcccaagcgcttgttcaggattgcgcattattacgtttatagctgcacgatcgcgcgtcaatatgtgtcccgcaagcgtgactatgcgcaacgaattgtcttgttcgtccattataaggttatatcgaatgcaacatgcacacttacaaattgttatataatttgaggtttggtgcaatgcaccaaaatcagcaccgctttgagcacgtgcgttttgaagcacaaatgcaatgtcatgaaatcgattctttaacttttttaatttctaaatattttgaccagcacaatcttgttgacgtaaaaggacttactttttttactgaatttaacaaatgtataattgccattagagccaaatttgaggcacatcctgattcagaaaacttgcacggtataaaaaacattatgggtatgtttttgcgcgacgagttcattaaacaggtgcctcatttcaaaactatcatggaatatcttaaagtgtattacaacccaataacaccacccgacgcgcacgcgtttatgtgtgaccaacattgccgagctgttggcaaaatatcttgtttgtcgtgtaaatgtaactatttatcaaatgcgttggccatgctcgacgtgggtctgcaggacggctgggacatttttctgcggcccatgttcggcatgccgttgttaatttacgtcctgctcaaaaccgactacacttcgcagccggacgttgtcaacgaaaataacataatgacgcaaatgtttgtgcagtttttttacaatttgttgtgcgacaaagcgtattcgctgcacaccaagcaaaaagcttgcgaaccgttagtcaaggagtgcaaacgcgtcacaactcttttgccaatcaaagatcgtcatcgtttgttggttatgctcaacgaacaatgcaacaacacttccaccgtggcaaacgcgcacaagcttttgacgccttttaaaaattttatgattaaaatgggtcagcgtactaaattaaagaaagtaaataaagtggccgccaccgtgctgattggcttctttttacgccactacattgaaagcatgcccgcgccttatttgcgcaacatgtgtggccttttgaagaccgatcaaaatttgtccgcgcaagacgaaatttgttctgccgccgaattagagttgctcaatgtgtgcaggtacatattaagaaaatactccgataaagatgtaacggtggtagtggaaaaattaaaaaggataaaactcgaaataatgaaagttttgttttgcgaaaaaattgtccccgaaacgtttataagacgcattattgtcgattaccagttggacaacgaaatttcgctgttgctcgacttgaacaatgattgcttcgataagcgataacacggattcgccgcgccgttcgcggcgtttgcagccacccacgactgcccaaacgcctgcgcccgcgcccgtacaactggaggccgcggaaatgttgcacaacatgaacgaatcacaaacggcggcgtcttttattgttaacgacgcgtccgaaaacaaaattgccagtctcacaattttgggcaaccagtcgatcgctgcgcgcaaactggtcgagtcgctgcaagccaacgcgtccacaattaagttaaatcgcgaagacacggtcaacgtgttaaaatttcttagtgacgtctacaccaaccagttggaggtggttaacatttcataagccgcaccatgagcgtgaccgatgtgcacattagcattgacaatttgcggcgtttgttggatgagaacatgcaaatggaaatttggccgcagctgctgcgcatgtgcagcgacaccgtgccaaacattgatttggacactagcgctatgatcgcgttcttaatcacggtggcgcgcaaggcccaaacggcgtttaccaacgccaacgccgccacggcgtcgcagtttgcggcgggcgggccgccttcgcgcgtcaacgcgcccgctgctactactactaccgttcaaactgtgttcggtggatttgcgcccgcgacgacaagcgcggagcccgcgcttgtcgacatgcgccgctaccgcacggcggcgcgcaaacttattcaacactacaccctcaacaccaccacgtcgagcgagtttaaagtgcgcgacgtggtaatggccatgatttttttagaacgctcggaaggctatcatcaaatattcaaattgctcgacaccgccatggacgaccttacgtgccggccgcaattaacggaaacgcaaaccaacacgttgttgcaaacgttaaggacgttgttagaaatgccgaacacgccgatcgacatgaacacggtggacgtgatgcgcagctcgtttgcgcgctgtttcgccagccccgtgttgcgttacgccaaaattgtgctgttgcagggcgaaacggtgagtcgcgacaaacgcaccacgctcgaagatcttttggtcgagcgcggtaacaacattcaaaaattgcagccacagcaatacgttacgagcggcagcgagattccgttttgcgacgacaccgaatttatcaacaagttgttgaaacacttggatccgtatcccctgtccaggatgtattataatgcggccaattccatgttctacaccaccatggaaaactacgcggtggccaattgcaaatttaacattgaagactacaataaaatatttaaaggtgccgaaagcgtcaagagacttgcaaataaaacggccgaggatcgtgatgaattggacatttatttaggcacgtccgctaagcgcaaaaaataatataaggtaaaaactaaagctacgttgacaacgcgcaatcatggtttatcgacgacgccgttcctcacgctctgtcagtggcacttataggcgccgccgtagaagctccgggtacagacgccgccccggcaggccgcgcacttaccgacgcagcgggtccgccacccgccggcggtccgcttctcgccgtgtcgggtatcgcagacgtcgctattaggctcgcatttggcacaattcacaatattggataaaggaaaccatttcgtcgccggcgcgcgtctgacgctcgacggtggcaaatttgtggcggcagggcttgagacttgtgccgcttggccctcgcagcaacgtgcactcatgaaacgtctcatttttgtgtaaataaattattttatcgcttagcaattctcgacgttttatttttttttgccgtttaacagcgcaactgattgtgcgcttttcatttttttttaacaacaagtttttgtaattcaacgagtatttacacaataggttgtcgaacaactcccttttaaattttggcggcttgatgtcaaaacgtttacaatttaaagtgtcaacgtaggttttggcgttaatcatgctttgctgcaacagcaagcaagggcattcggcagtgttatgcgtgtccaaaaaatcaaacagttctacgtacaatttaaagtcgttggtggtgctgttgaacagccgcattacacagtcgatttgcaaacgtatttgcttgcgctcttttaccaattcgctgacgttaggaacaaacgcgtacagcgaatgaaacaagtggcctgtgccggcaaaattgaacgttttgttttttacgtagcacgcaaagtttttggtcaaaaaaattatcagttccgtgtaatttttgctggctcgaaacccggcaaacacggtgaataaggcgcgcggcgtccattgctcagcatgaaatgcaggtgggcgtgtttgcggctgcgcaacgccttttacagaagccatgtgttagcagtggccgagtacgcggaccttaagtacttgggattccaaaaatacgaatattttgaatatgttttgtttcaattaggcaccgacccgcagttgtgcagcgtcatagcgtccaacccgcggtattgtttgcaagtgtttcacgccaacgacgatatgtgtaacgtgcggcaccaaattaaaacagcttttaaaacgccaatcctcggccacgtgtgcatccttcagcacaagccggctatgtacgcgtgcctcgaagagtggtacacaccgttcgagtttgaagtgccgttgttgcgcaacgaatcgttggtgtgggactttccgcacgtgctcgtgttcgatctggacagcacgttaattactgaacaaaaaaacgtgcaaattcgagacccgcaaatttacgacagtctgagcgcgttgcgcgaccttggctgcgtgctagtgctatggtcgtacggcagtcgcgagcacgtggcgcactcgttgcgcgcaacacaactggcgccgtatttcgacgcaatcattagcgagggttcaattgccagagacacgccggccgcgttgaccgcgacaacggattgccaaatgcaaagccgctatatcccgtccaactttatgtttgacatggacgcaaaaacgggcgacaatctgcccaagtctccaaaaattgtgattaaaattttggccgacaaaggtgttaattatttaaaatcaatcacgctggtcgacgaccttcccagcaacgattttgcgtacgactactatgtgcgcgtgaagcgatgccccgtgcctgtgcgcgattggcaacaataccacgaccaaataacggacaacattgaagaatacgacaatttgtatatttaattgtacaataaataaaatacctattaaaattcaatttatttttattgttttacttttattgtaattgcatgttgcttaaacgcgcaatctgccgctccgtcatcgtggcgttaatcacgttcattaactgctccttagtgtaattttctaacagcgtaattttattgtgcttggccttaaacttgtcgcgcggaatagcttccttcactttgttgagcacgttcattgagttgggcacgtagtcgctgctaaatatgacgtcgctcgaacccaaacggcgcaggctgcgccgcagcgatcgcttttgcgggcgcaaaaaggcaaactcgttgttgccgatgtcgcacaccgctaggctgtggcaaagttgaggattgctgggcttggcgatcacgtcctgagcgatgtcggccatgcggttggcaagttgcgccgtttcgcggcgcgcgttttcgcaatctttacgcgcttcgtttaacattgcattagcttgcaccaatccggtgttagcggtcactaacgcattggcaaaatgtataattttttcgttggcctcggccaaactttcgctagcaaacgtcaactttttatttaactcttcaatcacaccataatttgtgtccatcttgacggccggcgcgtacttgcccgtgcgcagcacctgcggtatcacctcctccagcagccacgcctgcagctccaccgcgtacggcagcttgctcttcatgatcagctggatgacgccctccttggtgacgagcactgtgtgcgggtgcagatacagcgggtcgccctgcctggccacgctgtccgaagcaaggggcgcgattcgcgcccccggctcgctgtacgtatatttgtattttttatccacgtgtttgcttacagcgtctttacaatttccatattttaaactgctggcaatgtccttggcaacaaacttgaccggctgctcgccgccgagcacgtatctgagcgtgaacgcgtcctggccgaatttgaactgcccgattttaacttgagacatttttatttacaaactacgcgtagcgatttggcgaaagcgcaaaacgaactgaacggattaattttgcgagcagcggcgcaagcacgcctcgagcgcgcgcttaatgtgctcgaaatccgtgcagtagacctcgccgctgttgcggtacggtctcaactcttgtttcatcagcttttcgagcagcgtgtggtgcacggtgggctcggtctgcagcacgtaccgcatctggtcgtcgtcggcgcggccgcaattcagagcggccagtcgccgcgtcaagtttgtagtctggccgatcttgaacaaattcctttcggcgtacagcagcgtcgtggccgcataaaaatggccctcgacgggagcggaattaaactttaccgtcgcttgggcgtcttggagcaggctcaacgccgactgtcgggcggtgcactggggcaacacgcgttcgtaaaaccaattttgcagctccgccgcgttgtgcagcttggagcgcatgaacagctgtataacgcctattttgtcaattaatattgtttggggtgacaaatacagcggatcgccttgtttaacgctattttctttgctgatgttaatacacccccgctcaaacgtgcatttgtacttgtcgtcgacgtgacttttaacggcgtgtttagtgtcttgatacttcaaactggcggcgacgtccttggccacgaacttaacttgctggtcccgttcgagcacgtaccgcagcgcgaacgtgtcctcgccgaacttgaactcgccaatctttacttggcacattttgaattattttattaaaaaagccgtgcgtattgggcaaaagcgctacgctaaatggtggcgattgcagtgccctttaaacgtttattaacgtttttgtgtgcggtcaacaattgactcaaacgcatttgacaaaattgactttagaaaagcgtgcaacgcgataaacaaactaattgctactttccaaatttacgtacccgttgtaaattaagtagtttatgacgtccatgatcgtaaattgaatctgttcggcggcgtctagcacgagcgtgtggtcgggcgagttgtttttgagcccgataaagtgttctattaacgttaaactgccgaccgacgtgcacgccgtggagtacaccccagtatcgttaactgtgcggatgcttgcgtttgtaaatttggccacagtgtactcgttgggacaaaacacgttggccgagtccaggtagtaatagagcgttttgtcaaaattatacaacaccacattttcgggcgcaataataaacagtcgctcggtgcgcgcgggtgtgctgaggtcgaaaatccgaacgtgcgttccgtacagcaacgtgttgtcaaagtcgcgcaacagcgtttgaatcctgtgtaagaatggatggtggttgcgtagcgacaacacgacgtacataaacaaaactactaacaacacgatagccaccattatgaacagcattctgtcgcgcttgtttagggacgtgaccaccgacgaggaatatgccgtcaacagtttgcgggacgcgaatcggttgataattatagacactaaaacgggcacgcgtagattgttggagcacgttagcaatttccgccagttcttaaacacaattagaaacgacgcggccggcgcgtgccatgcgcaccagcgcgcgacgcgtctagaggacgaggatgacgacggatcgtcgccgcctttggtggccaaacgcgtcagcttcgcgggccattcgttggtgttggaaaacaacgatttttgcgtgtttgtcaaaccctttttattaaagaagcattacgatgtgataaaaaactatttaaaattggacagattttttaaaagtgaaaattccgaacacactaacaaatgtgtgcaagtcggagattactgctattggcccaattggcccgcttcgcaggccgtgtcttttactggatggcaactgtatttgtatgtggagtttggcattagcgtggagtcgacgattcccatcattcacaataagcggttggggcctgtcgatttgtttgtgttcaaccctaaaacatttttgaatatcgagatgagcctgcgcaccaacgaagtgccgtccatcaagctttttgtaaatggcaaatttgattttgaaaaaaaggattgcaccgaaaattgcaagcccgttgaaaatttgtttgaactcaaaatggccaacggcgccacggccacgtgcaaaatgattgccaatttagttaattcaaacaaaaatttatttgaagttattcgcgacaacataaatttagaggaatgcattacgacacctaagtatcggcacataattgacgtgaacttgaccaaactgcggcaattctccaacgattgtgcatcctcggtagcggttgccgaacgcgcgtttcagccgccagccgtaaccaccattctttccgctagcagcgaaaacgcagaaactattcaacttgaaatagatttagcgctgttaaaagtgcgcgagggcatggtcaaagcaatggcggaattcaaccgctctgacgatgtcgcccttttacaaacctatctaaaggcgagcaactttaaaaattttcattttttactatttaacatttggaagcaaatagtaaaaagagacaagaaaagtttccgagaaacggacatgaagttgttctttgaactggtatgtgaaacgctgtttggcaacgagcgcggtgacgcgttaacgacagcgcttgccaaatgcgagccgttcactatgcgcggcgtttccacttttaacagtctttgcgaccattggcattgtttcaagggcgtcaacccgtacattgtgttgggttcgtattttggcgcacattattttatatttttgaagctcagcgaaaacgaggcgtacgagtgcgacgacccgtgggcgtttacgtacaaaaacgccacagagtgtcaaataccgctagacgtgttgggacaggctttttttatcaaagttgaaaacgtagttacgcaagtgacactcatgttcaacggcgagcactatcaaattgtcaaaaaggacgacgatttatacaaaatgataaaaaacaacccgtacaaattgcaaaacattaaattcaacaactggaaatacatgtatcacactaaatacggcgtgtacaacgtgatcacggacgacttttactccaattgcccgtttttgttgggaaccactatgccgggcacattcaaacggcccgacgacccaccatatttgcccgagtccgtgtttgggcacatgctcgccactagcgccgaagaacgcgacattttgcgcacataccacattgccaagttgtgcagggacgtgaaaatggtaaaagtaaatttgggcacggtcaatttgttgggcgattgcgcagcttgccaattggacgcgcgtttgaggcttaacgatttgtttcgagagctttggaatttggacgacgaaagccttgtgacgctggcgttgtatgtaaacaagttaaaggtggaggacattgtgcacaattttaaatgtaacgcgtgtcgcgctggtgccaaacaaggcaaatgtcgatgtgttcaaaaaatcaaaatcaaccgttgtgcgctaaaggtgtgtcttgtatttgatttgtttgttggcgacccggagctgacccaactgatgtggattctcatttttgccattaacaagttgtacgttgccaccgctttaatgttgaccgacagccagcttgttgttgaaaacgcgcagttttttgctaaagaacacgccaaaattgcggtgatcttgcaccgcgaattgcacaaaattgagtttgtagacacgctgatggccgacgtgtgcaaccgggacacctttatggcttacgtccaacaagccgcggccgacgagcctgtccctccgcccgacgtcaacaacaccgtagcaaagttttatttgcattacgccaacgcaactaacatcttgcacaaatacaaaaatttgtggtgggacaaaattattttggcgcgcgattcagacaccctgtctagttggctgacacgattctatttgcgtgttattttatcgaaaatggacgtgcaaaattacccggtggcgtatttgacgcaggtcgttgaaggctatttgtattttaaacggtacaccaattttaaccacgccagctcgtttatgctgatgcattttgcggccagcttgtcggttcccaccgattacggtcgtaaggcggtgtatttgccgggagtgccattgtcgggtaaatcgacgttttttgaactgcttgattttttggtgttgatgcacaagtttgatgatgagacgcacacgggcgaatcgaaggagacaagcgacaaagaagtgagcaaactaaattcgcaattgtacacaattaatgagttgaaaaaatgcagcgaaagtttttttaaaaaacacgccgattctagcaaaagcgattcaaagagtcgcaagtatcaaggtcttttaaagtacgaggcaaattacaaaatgttaattgtcaacaacaacccattgtacgtggacgattacgatgacggcgtgcaaaaccgttttctcatcgtgtacacggaccacaaatttgtaccgcacgagcacttttccgggtccgtgtaccatcacattttaaccaagcaatacccgcaagagcctatgttggtggacgcgctcaaagattctgtgcgcatatttttggcgcacgtcgtcaaatatcagcgggaaccgcaaactggacttgtaccgtacaaaacgctgctggacaacgaccccgttcatcatcacaatttgacacgcctcagcgtcaacaacagtcccatgtatgctctcatgtacatattaaatattaaaacggcgccgcgcagcgccaacatgaccgtgaccgaggaaaagatgcaagaaatgattggccacgccacgcagcatctcaaatcgtttttacacccctcgtttacgcaatacaacgcggccaagaacatcaacgccggcaccgccagaaattttgtgtttgacgaaaaaattttgttgcagcaaattaaagacaaatttaaaaacaactacgacgagcgcagttgcaagtttaataatctaacaatggctctcaacaaattagacatgaacattaatgtgcctcaattcaaatgttaaataataaaaacaatgacaaataaatgtttgtttcaacagatttacaattccctgtaagatttatgatttttcaagtacgccgtgtgctcggcgttcaccactgtgtagccgttttctagcaaaagctgttgcgctggcgagttgcgcgtgtaaacgagcgtgcacgccgaacgacgcaattcgcgcaaatcgcgttcggacagcggcgctgcgttagcgtcgattaaacacacgtgcaacccgtcaacagcgaagcacaacatgttgtcttccttagtcattttagttggtgacaatccctttataactataaacatgtttttatactcttttacgtcaaaattggcggttgtgcgcgtcacggtcacgtcgttggacgcgcccggcgtgttaggcgagcgcacgccgtggtcgtagatggtgccaataaacacgcagtttgtgtccacgcggccgttgccttgttttacaatgtcgtccatagacatgggtttttccgctacatacacttggctaactttattgtcaccgtgcgccacgcgcatgtacgtcagcttgttgttgttaagttttacattaagctgttgcgtttcggggtcggcctgcagcgaatcattgctttgagccaagctgggcgacgagtcggtgagcgagttaaggttcaatttgccgctataccacaaataaaacaaaacggctagcaacaataacaaaataagaaagccccacatgttgctattgcacaaagtcaattgctattaaatttaggccgtgcaaatgttttaaaagtacacttaaattatcgttttcccaaccgggcggcaccaacaccacaattcggctgcccagcccaaacacttcaaacgcgccggtgataaactgctcgcaatagtgcaacacgttgctcccaaacgcagactcgtccgccaattgcacatacgtcttatacatgaccatcaaatcgaacagcacgtggtgtttgttgtaggcgccgtcatttttaagcaccatgtgcttgtacaattttttcataaataaggcttgttcttgtttgagctcggcaaagtaagttagcttgtcgcacgacgcgtccgtaaggcattctttaatattttcaaaataaatcatcggctcgtcggcgtctgcgtcgctgacgtttaacgcgaccgacgacggcactggacatagatataaacgcaccaatttagttgccatgattccgctcacgccgctgttttcgcgctacaaagacagttatttgttgtacgcctttcgactgattgagttgttgcgagcctccaaatcgccgcacttgaccaaattgttgtcctcccaagcaacttatttatatcatttcgcgtgtctaataaaatatagagacgtgcaaaaatacgaggtgcaacaattaatcgagtgggccattaacgcgtctcccgacctagatttgcaacagtttcgcatcgagtttatggacaaaacggcagagctcaacttgcgttcatgtcaacctaaaagttttatgtacacgtttacgacaatttgggacacaattcattttttgagtttaatcattgacgacatggtgcttacgcgtgaaaaaagcagtttagactttgtggcgcaacaattaaaaactatgaaagtgttattttataatattttttttatattaaattgcgccatgtgtcgcgaccactatatgaacgtgaaagggtacatcatttaccacattgaacgcatagaattggcgttagaccgggagcggtacggcgcgcccattatttttacaaattcctactgcaataacatgattgagcgcgaatgccaagaagagcaaaatgcgacggatcaagttgcaaaatccgctaccgagtcgatggtgccgtctaacgtgttaatgaaaaatttaatggcttatgtcagcatgatgtttcacaaccacatcaacgattacaagtggattcaacgaaaccaaaaaccacccgttcatcaagaacacatgacttgggatcaatataaaaaaactttaagtttgtaaattgtataattaagaatggtcattttaaaattagtaaattttattttaataatattgttaacgctatggctgttattgatgttaaaacaaatgcaactaccaaatcctttgccatttcctaatccaacacccgcacaaacgccctcgccaacacctccaccgacgcccccgccaacacctccaccgacgcccgcgccaacacctccaccgacgcctgcgccaacacccccaccaacacctccaccaacgcccccgccaacacctccaccgacgcccgcgccgcttggagatcccatgtattttccagctcatataaccaacactgagcaattgcaaaattacattaggccgttgtgcggttggccgcgaccgcgcgaaacgtacgcagtaccctgggattgccgtcaagtaatacactgcagcttttttggtatctctttgtggacggtgcaatgtgacacgctggctgacaacgcgtattcgttcacggccgacgggtgcgtggggcacttgcggtcagactgcccgttttacccgcttaacatactttagaaggcactattcgatccggacgacatttaagaacgtttattacagtgtctgtaacagcacattcgtacacaactccgtgttctaattgcaaatctgtcgcgataatcctgtttaataatggcccgtcaattgaatgcaactcgttagttgacgcgttaaattccaattctacagtgggcatccatttgtatttagcgtactgcagttgctcgtccagcacgatgtatccgtcgatcgcaattgtgctgtagtgcgtcagcgtgagcggcgcgtcaaaaaactgctgaaagcgcagctcgcctaattgcggccacgcaattttgcccacagtattgtgtaaatgattcaggcattccacggccacgtccgcacgtattggatatgactcgtgcaagctgcattcgtactgtgtgcgattgttgtatttgtaacgaaacacttgcagcaaatcggtgacaaaaattttgtccgccatcacctcgcattgaaatgctacaacgttgttcaagccaaaagggctggacatgtgcgccgcgtgcagttgcatgtcgtccgtttgtattaaattaaaattgcgcctgaacacgccacggccgcgaacaccgtctaatttaaacgcccatttttttacgccagtgctgtccggcgcctgcgcgccgtaagaaattttttgctcgcgtgcaaatttgcgcggtggtgcgctatccagcagcgtggtgtaaggcaagcacggggcaatgttgtgactgtcggcaattgcttccatttgcacgatcagctcgcaaaaccggtcgagactggcggtggcgggcgcggacccctcaaattccagttctaaccgaatgcgcgctagtatggcgtcgctgcccagctgcaggttttgcgctgggcgtgcacatttaacgccgagcagcgcgctttttaacgcgacaattttatgcgctgcagtagactcgtattggtccgccaatccgctttgcatgtacacatgttcaaatttgatgtcaacaccgtttagcttatacacaagcgtgtcgattagcgacgcgatgcgttgcgaaacgcgctcgcgcggcactgtggtttcgcgattctcgcgccacaccaatggcaccaacgcgttggccgaacttagccaatgcacaaatttttcgtcacgcaaattggttttttgcacgctgaccgtgttgtcggcaccttggcgagtgcgcacgttgttaacgtcgtacaggtcaatgtagtgttctgtaggtgcaacgcaaagtttttttatataagaatctaaaattaaatacaatagatcttggctaaaattgattgtataagagatttcttgctctatcacaaagtcggtctccatcgccgtaaaaaatggcactagtgtcacccggcgtatcgtcgcgacggtcaaccaaccactgcatctttggctccatcgaaccgtttgatacgtgcatcacgtaccggtcgccatgttcgtcggacgcgtcggtggacgacggatggtttatttgcgattatcatttaaaactgcgctttaaaatgtctaaaatggttttgcctatttacgacgaggacgacaatcaatacaaacgaacaatagctaggcatttagttggtcacaaagaaaggggcgtaaaacgtattttagttccaactagaaataattacacaactgtgtttaacttgccgggcatgatgctggccgaacagttgatttttcatttaatttacgacaatcgcgcggaggtggaccgcatttgttcttctttgagaaccagcgaaagctttatggataacatgtacaacgtggtggaaagcgtgtacaattcaacgcgcaacatattgttgcttacggacccgcaggcgtattgcacacgcgtggccaacgatgacgtgcgcttttttgacgctaccgtggttaacaacaattaccagccgggcagcggcgacaccgtatttaatgccatgcccggatttttgcgcaacttgatcagacgcgccgtagcgcccgaaacgcttcagattgacagtgaagatttgcgtttgcgaaattgccgtacttgcgtaattgaccaaactggcttggtggctacaattgaaggtaccgaattgtacaacccggtgcggacttcggacatcattaagacgcgccccaatcgtttgcaaattagaaacgttttaaagtttgagggcgacacacgcgcgttagagcgcacattgggccgctacgaagaataccccatgtacgtgcctttgtttttgggctatcaattagtcaatttgcaaaacgacattttgcgcgcaaataactttatacctgcagcgcttaatgtgcccgcaccagcggccaatgtgcctgtgattcaacaaaacttgccgccgcaaccagcagaagcagtgtaattgcaatggacacggtgaaattacagtgtaacatttgctgttcggtgggagaaataaaaaattattttttgcaacccgccgacgtgatcacgatattgcccattgtggaattatattcgtgcaaacaccagttgtgcgtcacgtgcgtgcgcaaaattgcgcagcgcaacagagacaagcgcatagagtgtcccatgtgtcgtcgcaaaaacgcacattttaacgtgtataacatcaatcgtgactcggtggacgtgttgcggtgcgcagtggccgacgcgcgcgaacataaacgttttaccggattggtggatgccgcgtcgcttgcacgcggcctttttgaacgcagtttgcttgacgtcgagccagatttaaacaatattacaaaaccaagtgaactgcagagtgtgctgaaacgtttgcaaacgcaaatcgacgagcaaactaaagttaactacgacatgcaaatgcacgcggccacgttggcgcaaactattgaagagataaacgaccgtttgcgcaaaagtcaaaacgattataacaacgtttgcaaacaaattgagacggttcgcgttgaccgtttgcgagaagagcgcgccatcaaggcgttgagtgacaaacgtgcacaatggacgatcaaaaacgcggaaatgcggcgcgaaaacgaaaggttgacaaatgaaaacataaaccttattcgagacagcaatttatttaaacaaaacaatgcacgcaaacgtaaaatcgctctgtaatttttttgttgtgagcattaaaatcgacgtcataaatgtattgctcgttgattttggtgcatttgtcccagttgtttgttgtgcgccacgttgtgttgtgctgacagcatagatacaacgcttcgttgaattgcgctgtcgacaaattaaaacgcttaagttcgcgttttatagttgctacaccttcaaatttttggtaccgttttgcaacgcatttgttaacaacattgcaagctatgcgttttagcggctcctggggttgaagccctagtgcctttagaaaatacaatttattatcgttgtcaactgagcgagttcgcattgtgaattgataactgcgcaaaactggttttgattaaatactgttatttgttaaagtttgtcaacacgatttaatatgaatccaaatctcaaaacttttgtcaacatttctatagaggtttacagtctagcgcgttcgaaaacatattatctaaattacattttattactttaggccaggtataaataataaactagttctattatacacatttaataaaaattgttcataaacatgttgtttgattaatagtatacattggggtcttgttcaagagcgccccatcccatgcgcgtaccaaaaatgtgttcgccgtttttgtccaacgcggcagcttccaaattggctagccacagcataattaaaattacaatacacacaatcttcatggtgacaactgtgcaaacattatgaataaattacttacaccgtccctatttatacaaacaaattgcaacatattgcaacatattgcaccatcataaatttacttgctttaccaaatggatcgtactcgaaaattaaagtcggcgctgacgcaatttctaaaaatagcacacgttttaccaaatggatcgtactcgaaaagcggggtcggcgctgacgcaattgctaaaaatagcacacgctttaccagatggatcgtactcgaaaaacaagtttaatgctgacgcaatatctaaaaatagcacacgctttaccaaatggatcgtactcgaaaagcggggtcggcgctgacgcaatatctaaaaatagcacacgctttaccagatgaatcgtacttgaaaagcggagtcggcgctgacgcaatttctaaaaatagcacacgctttaccagatggatcgtacccgaaaagcgaggtcggcgctgacgcaattgctaaaaatagcacatgctttaccagatggatcgtactcgaaaagcaaggtcggcgctgacgcaattgctaaaaatagcacacgctttaccagatggatcgtgcttgaaaaacgagttcaatgctgacgcaatatctaaaaatagcacacgctttaccagatggatcgtactcgaaaaacgagtttaatgctgacgcaatatctaaaaatagcacacgctttaccagatggatcgtactcaaaaagcgagttcaatgctgacgcaattgctaaaaatagcacacgctttaccagatggatcgtactcaaaaagcgaggtcggcgcatacgcttgcgtttaatgttgcatgttgtccaaataatacaatttgtcagcttccgtgttgcatgtgaacgtgtttttgtcgtacaaatgttcaggacacgccatatagcgcccgtttttttcatgaacatgtttattatatcgaaccccatcgttagattgagtttgcaaattgctaaacacgtaagacggaacaggctcttttattacggctacgttatcaccgtcaaacacagatctgcagcccacgccgttgcccgtgtaagcgtacgcgtttaaaacataatgaaggtctttggccgattcgcattcttcgtccactttgaccgtggttcgcaactgttgcaacgcgtcgattatcacgtcgttttccgcatggcaactggttaatttaaaactgggcaattcgtaaaaacacgaataaaataaatcttttttatctaaaattagcggtgacggttcgggttcgggttcgggttcgggttcgggttcgggttcgggttcgggttcgggttcgggttcgggcgacggcacccaatggtcgccgtcgccgcttggcggctcgctgttgggaaacgcatcaaacaacggttgtgacagggcatttttgttgtcggctggctttagcgaaaacggatcgaacgctggtctggaaatcgtagcgttttttaattgtgtattttcagcatatactaccatattttggggttgttttacgaaagtgtagttatattgaaacggagttgtagtatatttgcgtgctagtgtagtatattttttgtaaatcgtagtgtatagatcggtgcaaatgtccgattgtagtatattggtcaatatacgtcgctgaaagtggtcactttttacgatttttaatgggttttcgtaggatattgcacaaaattgtttgtaatcctcgtccgaacccgtcaaatcgtctttaaaaacgctcaaaaacgcgccgtcgccaaactcgatggtttttaacaaatcaccacctgattctgtgcaaatgttggcccgatcggcgttcatgatgtcgtacaattgcgcaccaaaacaattaattggctcagcagtgaccggatttagaccaacggcgtttacgtcgcgcgctaatagtacattttcgccaaacgctgtgtcagggtcggagcccgtaattaattcagacaccatgcttgttaatcccaccacggatgtttgcatgtccacgttgtaatcattgggcacgttttctattaaaaacgtggggtttaacacggttacgttgttaaaagtagctggcgcacacactccaaggtcaagtacttctcgcggaaattgcgcagtcaaaataaacttgtctataaacaagttgttaagtagcacgttgctagtatcgcattgaatttcggatataacttcataattatcacaaacaatttgcccgctggcatatttaaaattgtcgtctgtgtgcatgttaactagttggccagtgccgttaggaaaatcggcgcagcgcgcgtcaccggaacaaacataatgtccgttggcgtcacgcgtccgatttatgcacgtaattagctgcgcttcgtaattgttgaggcatttaaaatattgcgcgtcgccaatgtcggccgtaacgtacgtgtggcctgcaccgtttaaagcgcacgggtgcgcttgcacgcacgacattaacgtgcggtcaaagacctgttggtcgggacattgtgctacgacgtgtttgccgtcgcgacactccataaattgattattcggtaacccttcgggaaaatgctgtaacacgaaaccatccggccgaccctcgcacaattcattgatttgacactcgttaattgcggcgttaaacgtgtaattgtcggggcattcgttgatcgtgtgggagccgtcggccaaacagcgcaaatacaacgtggggtggtgcagatgctcgttgtccgtataatttttgtcagagtgctgattgtgcaccaacgtgtctagcaaccgctcgttcataggatagttgccggaagcgcgaccttcacacgggtccacgggcacgcattttaattggtcgtagtcaaagcggaaatgttgcgggcagcgcaatgtaatgtcgcccgcgtctcccgtgatcaaaaacgcgtcgggttcggcggttacgggcgcgacgcgatgttcaaccgtcgctttggcggtgtcaaatttttgctgcaaaaaatcaaaaatctcaatagtgtcatcgtgcacggtttcgtggtacgtgctcaaatcgttggtcctaaaccagctgacaatgtacgtgtgatcgtacacgtccgacacgtaacctagcacatccggcgtcggtttgtcggcgttggtgcgcctcgtgtattcagtcagcacttgcaaccgtttggaaaaggttgtttcgtcgaactcaaaaaatattgtgtaatatataagtacaaaaattgttagcagaataatggcgaacactaacatcaccacgtcggacattgttgttagggcgcgcgtgttggttgaggacgacgacaatacagttttggagtttgaggccgaaaacgaacaccgcttaatgaagggcgcgcacgaagtgcatgtggttgtttcgccggagcttgacgcgctacacaacgggccttacaatgaaattacacttggagactacacgtttcattacaatttaatggaatcgaaccgctttggtgcgcaggtcatgttgtttgttaaaaaagacgatattaaaattgccggccccgtgtttaggctacacgtgtggaatagtaagaagagcgtggtggcgccgccgcattatgacaccgaagccgctcctgccgaggaaggccctgtcgccgaacgctttggcgcagaatctagcgacgcaccgccgtcgcccaaaaagcaaaaattggacgagcacgaacaaaattaaatatgacagcgaacttttattaaaatatttgtacgaggggtttaacgctgacaagttgcaaggcaacattaacgtaataaaagtgtacaaagtaaaagtgaaaaaaacgggtgcatctattttggcacattattttgcccacgtatccacctccactggctacgagtttgaatttcatccgggcagccaaccgcgcacgtttcaaactgtgcacaccgacgggcttattatcaaagtgcacattatgtgtaatcaatgctgcaaagcagaattgcgcagatacgtcgagggcgaaaacggcttcaacgtagcgtttcgcaactgcgaaagcattttgtgtcaacgcgtcagttttcaaacgctgctgttggcctccgcaatattgctgttgttgtttaacgtcgaaaatttttcagcgcttaatttgtttgttattttgcttattttgttggcgctgttttgccacaacaattacattataagtaacccccaaattgtattttgcaaacataagaacacattaaaaaaccatgaatgagcgtgacggcttttatttaaacccttcacaatcggcccaatcgtttgcgcctacaaatgcgacttttacaaactcgcaaagtggttatccagccacagtgtctactactatgtcgcggatggacagtcgcagcaacagcgccgcgtcgctagttaaaacgggcgacgtgggcgaggccatttggtacaacaagtgcaccgactatgtgcacaaaattattcgctattaccgatgtaacgacatgtcggaattaacaccactcatgatccatttcattaacaccattcgcgacatgtgcatcgacagcaatcccgttagcgtgaacataatcaagcgcgtgcaaagcgacgatgaaattgtgcgccatttaattgcgttgcaaaaggagctgcgccaaaacagcgtagccgaagcggttgggtcggactttaacatttttcaaccgtcgtttgtgcttaattcgctgccggcgtacgcgcaaaagttttacaacagcggcgccaactcgctgggcaaagaggcgcttaacgaagcggccaaacagcttagccttgccgtgcaatacatggtgtcggaagcggttacgtgcagcattcccattccgctgccatttgaccagcagctcgccaacaactacgtgacgttgctattaaaacgcgccacgcttcccgacaacattcaagaagctgttaaatctcgcagttttgtgcacattaacatgatcaacgatcttgtcaacgcggtgatagacgatttgtttgccggcggaggtacatactaccattacgtgttaaatgaaaaaaatcgcgcgcgcgttgtgggactaaaagaaaatgtgggttttttggcgccattgtcggcgtctgcggacatttttaactacatgtcgcaactagccacccgtcacggcaagcggcccgacatgtttgaaaacgcggcgtttctcacgtcggccgccaacgccatcaactcgccggccgcacatttgacgcaaagcgagtgccagaaaagcttgtctcgggtggcggcgcagtgcgaaacgctgatccggtttattttcatgattatgaatcacaacgtgccggttaacgccccggtagtgacgcgcggcgagttgtaaccatgagtttgtatcgaaacaaggtgtggtgcgtgtacattttgcggcgcgacgacggtcaactgtacacgggcattacaagcgacttgagtcgtcgactaaagaatcacgcccgcggcgccggcgcgcgttgtttgcgcggcgccgcgagtttgcagctgctgtattgcagcgctagcgcatacgattacaagaccgctgcccaaatggaatacaatcttaagcgtaaacgcaacaaatattataaattgcaactcattaaagcgcagccgcggtttctgcaccaatacctgttggccgacaagccgctgcgatgaatttagacgtgccctattatcggttgggcaaccatgaacgtgtagaatacatcccgctcaaactggcgctcaacgacgacgcaccgccggacaattcacacgagtacgccgactcgatggaacacaaaatggacggcgagatgcaaactcgcgcaaaccaaatgtcaaccggtttgattatgtttattagtctgattgcgtttgtggctttgtttttattgctgtacgttatttattattttgtaatattaagagagcaaccgcaatattctaacgatattgacaacgatccttcctttttgttcaacaaattcgattaacatggatgggctgggagctcgtaacgaaaacgtttttaacgattggaaagcacgcattcaatcggcgccgcaatttgaacacgtgtttgacctggccaccgatcgccaacgatgcacgccggacgaggtaaaaaacgacagtttgtggagcaaatacatgttccctaaaccgtttgcgcccacaacgctcaaaagctacaaatcgcgactcattaaaattatttttagcctaattgaggtaccaaatttgcaaaactcgtcctacgacctcaacagagaatttgattcgattgaatttcagcggctgctagtggacccaaaagagttgtgcaaacgcatgctagaattgcgttcggtgaccaaagaaacgctgcagctcactattaatttctacaccaacgccatgaacttgtccgagtataaaattccacgcatggtcatgttgccgcgcgacaaagaactcaaaactattcgcgaaaaggaaaaaaattttatggtaaaaagcgctattgacaccattctcaatttcattgactccaaaataaaattaatgaacagcgattacgtgcacgaccgcagcctgattcgcggcgccattgtgttttgcattatgttaggaacgggcatgcgcatcaacgaagcgaggcaattaagcgtggacgacgtcaacgtgcttatcaaaaaaggcaagctgcacagcagcacaataaaattgaaacgcaaacgtagcagaaaaaacacgctcaacaacatcaaaaacaagccgttggaattagcgcgcgacatttacgcgcgcaaccccaccgtgttgcaaatttcaaaaaacacgtcaacgccgtttaaagattttcgtcgactgttggacgaggcgggcgtggacatggaacgaccgcgtagtaacatgataagacattatttgagcagcaatctgtacaacagcggcgtgcccttgcagaaggtagctcgtttaatgaaccacgaatcgccggccagcaccaaaccatatttaaacaaatacaattttgacgagagcagcagcgaggaagaatcgcctaccaacaaccgcgattcgtccgccggttcttcaacaggctcctcttcgctttattatcaaaccaatagataatcaacaaactaatagataaggggcaaaatgaatttgtacttgttactgggcgcactggccgtgtttagcctggtgtacgacaagaaggaaaacggcattgtgttttatttgctcattctagtgttagtgtttgtgctgatcagtccggcgttaataagcaaaaatacggagtcggccgcaaacgacctgcccagccataaagctaaaagcgtgcgcaaaaagttagaaatagaacaggcgctagacgcaatacttaacaaaaacaccagctcgttagattgacaacatgactagcggactaagggggtttgttgccgaattaaaaaaatcaacagagtttgttgccaaagtgatttttgtaaaagcgcgcctcaccgattggctaaacaaacaagtttacccggacgagcggtttgccgccaaatggcgcggcgtgttgcgaatgtttgtcgctggcaaattagacgacgaatccatttattgtttagtaaacacaatagacccgtccaaactattgacccatcggcaaattgattatcttgtacgcgtttttctaggcaaccgcaaaatggttaatattacccaaaagtttgtagacggctacagattgtcggacgacgacattagcgagttgtcaaattttttggtaacccaagtagacgaggtgtaccagttataagaacgtttttcaacatgagctccgttgaccaaaactcgcctgccgtcgccgcacttgaacagcctaatcggcgaacattgcacgtttccgcggatacatacaccgtggatggattgaaacttaagcccgcgtacgtcgaatactaccaacaattgcgggaaattgtggagttgtccgtgctcacaatcagcaaggaattgcacatgaaagaaaaacaagaagtgtactcactagcgcgtcagttgtacgaaatattgcgcgggttgtttgtggacgaaccttttaaattatggcttgaaactaacgccgcgcaactagtcgccgacggcgaatttaaaaaaaatacatataaaatattgcacgaccaattgcaggccgccaatctgaaaaatggcacttttaaaaatattgtactcaacgtgctgaacaacgagctgagcgacaattcaaattgttttgacaccagcaatggctatattaagcccaattgcattgtgctaacgtttaattgttgcgatttatcatttgagccatgacaactccccaagctgagcttattgccgtgcaaaaacaaacgcttgatttaacaagcgaaacaaacacttttttaatggataacacgttagataaggatttggaaacgcgtttaacaacattaataataaacgtaaacaatataacgtttgatgccgacaagccggaattaatgtattacaaatggttaaaatcaaacattgtaaattgtataaatatattaattgatttaattataataaaaaaatatgtataaatacaaacagtattcttattattttaccacgttgatgtaaacaaaattacaattgttgttaatttgtacatagcgatcgccgccatcaccgtcgctgtcctccggcgccatgcacctgcacagcagggcagaaacagttttggacacgctcttgacgagtttgagtttgcaatacgcaattaaattaccagacatacaatacaataggtgtttaggacttattactgcggcaaggtgtttatgcggtccacaatcttactgttacacacgcaacagcgtttgcaacgcaacgagcactctgcacacacaacaaggtgccgacacggcaagaagcaaacggatttttcgtttgaaaagcacactttgcattcagcaacagcagaagcgtcgggcggcgcgctgggctttataaaatcctgcggctcccggcgcggcggcggcaaatccacttgcaatattttagacggcgcgcagtcgtctaggctgacgtcgatcacgtgccgaaaagtgcacgacggcacgtgcgctttttgcgcgttgtctaccgatacgtacgcggtgacggcttggcaaccggcgcaacgcacacgcgcgcgtttaccagagcaataaaaaccgcggcgactcagcatgtcgattaccctggtttgcgatttaaattgtcgtcgcgcccacttgaagctgacaaacgagtgttttcgcaaactctcgttaaccaacaaggcgttaatagccgatgtacaattgtcggaataagtgtgtcgcttagcacggcgtgcgttaattttatccattgtaacactacatccaatgcacttgatcgtgttgttgtggaaaaataaaccggttttggccaaatcaaccttttgcacgcggtccaacgacaggggggccatggtcaacacgcgcccgtgtgtagacaaaagcaaaaaattaaacttttgcaaatccatgcttaattttgtttaactcgtgcagcaacgcgcttaaatggcgacattgcaccgcgcaaaattttcgaaacgcgcgcgccatgttagcgacgtcgtcgtcgccgtcgcgcggcaccggcaacttgccaaaacacacgagataacgctccgaattagacgggcgcgacgagggcggctttaccaagcgccagctagcaaaatggcacacaaactgttgcagcacacgcagcgtttcgtgttgaaacgcatcaaacacttttaacacacaattgccgccgaggcgcaaacaaattaacgcaagttgcgtttcgcgtaacatgagaggcgcattaagttgttcctgatcgttttcgcggccttgtgagtccacggcgccgtcggcaagcaccaaatcgcacgcgttgccgcaagccacgctcaaatcgaacaacacgtttttgttaaacacgtcgcccgttgcgtcgggacccaacacggcggtaaaattagaatgagtgcaaacgccacgtttgtacggtgcgttggcggccagcgtgaccccaaacacgcggcacatcggattgtgcgctaagatgtaggaggcgaattcgcccggtcctccgcacaggtccagcactgtggccacaccgcgacacacaccaaattgtttgtctatctcagccagtttgcgccagcaacgcggccgttggtttgttgaccggtcaaacaaacgtgctcgtacacgcctaatttgcgtgatcgtgaacgagtcaagttgttgttttagttgttcgagcttccgttgcgacatggcgcgaattgggttgaggcagaaacacgactagcaccgtcagcagcaccaccagaataaatagcagcaaaacgtgcgccgtgttaacattgatcgtgcggtcgttgtagtgaacgggtctgttgagcgccgctcttattcgttcatttaacacaatcaattccttgtttttaacattgtacacgattggtgtgttatagtcaaaattttcaaaatctgctcgctgaaacattgttcgaaacgtgtagttgagcggtgtggcgtaagccacgtttgcaattaattctcgccaagctaacgcgcggtgttcgggcgctacttctacctcgtcagaactcaatatttgccaacgaatcgtgttccacataatggccaccaaacgagagtttgtcaacgattgcagcggtgacccgccgcgcaagaagataaaggaaaactacaaacgcgttacgggcaaactgttaaacaaaatgacaatcagtttagagaacaacctttattacacgtttacgtttcgcctgctaaatgacaacaaaacagaagcgtattacggcaatttgcaatgctttaaagatttgatcgagcaggagtgttacgacgttagcttaaattttgtgaaaaccaaatacaacgagcgcattgagattaacgagtatagcaaatgcgacgcgttaatagacgatagcgtgtgtgttaaacaaagtttgacgcgagccaattttgaaaacgaagaaattgttaacgtgttggctaagctcatatgcgtttttaaaagactaaatgcccacacctataaaatggtgtttgaaataaacatgcaagacgcaggcggcgccgtgcgcgtgcagcaagtggaatgttttgttaacagtaaagtgctggcgagtgctgtgaaaatgcacgtaaaaagcattgaaaattataacgaaattatagatttttattttaaaaacacaaacacattgtttaacgtgcacggcattaggtgccagtacacgagcaaaggacaaaacgcctttttaaattggaccgctagttcatctacaaatttaacattgcccacgaatactgatgaagaagattatcttaatttattgcacagccgtgcgacaaacaatataagccgtgctaacaagcatttaaaatgtatgcaaatagcgcaatttaaagctgaacaaaaaaccaatgacagtggaaaaaccagcttttcggtccaattcaaaactgtcgatgcaatggaagaagacgacaataaatgggacaaatgtgtgtattatattgattacaataataacaaagaagatgcaaacgaggctggcacattacaaaaactagctatggattttgaccaactggccacatttttgtccgacgggttaattaaagctaacatttttgtcaccgctgacaacaatgacgttaatataatgaatttgctggggctgttaaaatacgacgacgacgattgtgaataccattttttttaaacagatggtggagaaaagctttcgtctgcaacaatgcgcgccaaagattcgtacattgtcaacatcatcgttttccattcaaaaatgttctccgtaactgttgtgtaatttgataataaagaattaatttctctaattttactgtttaatttgctcatttcctcttgtacacttgtatttgccatttgttttaaatcgtttaatttagcttcttttaaattatttagtttgcttttagcagcgtccagttcgtttcgaacgttttgcattgatttggtgtctaattcaggtgtagtgtttactaaattttgaatcgcggccacgtcacttttgtttttggccaaatctgtttgtaaactacgtatttcgcttttgcaagtgtcgtccaatgtggcaaatttggtttgcaactctgtattagtagctctcaaagatttattttgtttggaaaattctttatgctgcgcagttaatgttgaaacagcgctaataagtgtgacattgtcgattttatcaaaatcttcccttttaacaatgctcttgtcaaaatttcttagcacgtcactaggaattatgttgacaatttgagattttaaatcgtttaaagcgtccatgccgcttgttgttaaagacccaaaattaagaaggtcatttggcgcagtggtttcttttaaaatggcaaaccatcgacttaacgcaaactcttgctgtcttgccaagttaaattgtaggttgcctaaatcttgcgacaaatctttttcaaccaaattaggcgtgaaaaattttgcattttggtacacgttatttaaaacggaaagtaaataatctaattcctctttgtccactttttctttgtccgtctccattggcgccgcggtttgaatactcgcaagctgctctttgctttgttctgttactctttgaatttgttgcatcaattcagtattaattgaattcaagttttgcaatttttcgttttgtgcactaagctcgttgttttgttgcgtaattgtttgttgtaaatcagctattttattttgcaaataaactgttttttcgttaaactgtgtttgtgcaatttgtaaattatttttatattcgtcagccatttgtgacactattgctttgtactcactttcctttactcccacttcaacatcgtactttgctttgcccgtattaatttgtgcatcttgccccgttactaaagcttgtaattcggatattttaatttgcatagtttgtatttccgtttgcaattcgtttcgtttttgtttttcttgtgtgtattgctcgtaatacgttgtaattggcgcttcaatttgatttcgtaacgtatttatttcatattttaaatcgttattttctcgtgttaaattatcgatgttaaattgcaacgtttttatttggtgagttgatagttttagctgattaagttccaaagataaactgtggtttaaatcattactactttgcaaattttgctcaatcattattttctcattttgtaatttcaaattgtcggcgcgttcctcgcgcacttgtttttgtaacatggccagctcggactcattttgttttgcaagtggtaataattgtacatttgtatacaatctgtcaattgtaccgattaaatctcctgaacttgtgtacacataatcagttttcataattactctgtgaattttataaaaaaactgaaacaatttaacgacaatcatgtgcaacgactccacgctagttgttaaagtttgcacatttacgtacgtaaacgccatattatatattgtcatgtgtgtgtttttaaagaagtttatgaacaccgcaacagtaggacacaaatctggtgtgacatttaatgtcacagacgtttccctggccacacagcgcaaaaattcgttaaaatcataattaactaatttgtctacgttttttaaagcttcaatggatttaattaaaaaagtgctgttcacaacacgcgtttgcatgatttgcgtcattgttgtgataaaagcggcgtaatgtccccaagtaatagtttgctgttgcatgttttgttgcaaaatttgcaattcgcgcatttcatccatggataattctatttgttgtacaatagcctgctgcggcaccggttgcaaagactgctgctgcggcggtataggtgattgttgttgaggcggtggtgattgttgttgaggcggtggtggttgttgcggcggctgcggtggttgttgtggtggctgcggcggtgtttggggccaatattgtccgtacgggttaaacggttgcggcggcggcggttgaaacggcaacgcgccgccaacgttgtaatcgtatttgtagttaatgttgtgtgttgtgttgtgagacggtaggtcggaaaaaaactgtacgataagcgcgggcatggcgtcggggtctaaaacttgcaagttaaaactgggacgcaacaccactataactttgtggatttctcgcaaagcgtgctcataccgctctagcgctttgattcgcgcactcatagagtttatagtgttcagcaaatctcgttgcattttggcgaaatgaaaatgctcacttacaatcagttgcaagaagcgtttcgcgattacgcgccgcgcgattttattgtgtcgagcagtgacgcgtttagaatcatgcgcattcattacaacgaaaacgacggcaagttaatagcgttttgcaacgtacaattaaccgatcgattggcgcaattttattttgtcatgaaaatggacctgtattcgtacaaacagtgctacaacagtcacatatttgccacgtgtcgcaataattgttccatctacaacacgtttgtggcgcccggcgtaaagggtgtgcacatggacaagatcaacgtgataaagttcaaacgcaacggcagctcgtttggtgaaaaggcaacagcgcttgacaaatttttgcacaacgcaaaccgtgtacacatgcagacgcccgtgatcgagggcacgtatttgcggtttcgtcgcgcgcagcgctgccgcagcaactgcgtggccgacgacacgcgcccgttcgcgcttgaatgtttcgctgatgattttgaggtcgtcgacccatccatattgacgcacaacattgcgccggtgatggcgtgttacgacatcgaaacgcactcggacggtcacaacagctccaaagccgagtgcgacgtcatcatgtgcattgggcttgcaatgttcaaaaacaaccgttttgataaaatatgcttcgtatattacaacgagcctattgaaattccgcaaattgacaaagacacgcacgtggttgtgtttaacaacgaagcgcacatgataacatcgttttttaaatttttaaaaatagttaaccccgatatcattttggactataatggcgacgtgtttgatttgccctatattcgcggtcgtttaaaaggagcaaaaccgctgctggagcgttacgatctgccaccattgcagccaaatacaaaattgtttataaccaaaataggaaacaagaccgacacctattattttaactattacattcacattgatctatacaaatactttggagtggactctaacaagcgcgacgtggaaaactttcaactgaacacgctaagtcggtattatttggacgacaccaaagtcgatttgaactggcaaacaatggtggaaatgtataacaacaaacagttgggcattattgtaaaatacaacgtgcaagattgtatgttgcccattcgtttgtttattaaattgaaactaacagattttatgtactcgcaatgtgtcatgtatcggctgtgcaccgacgattttatatgcaacatttctcatttgatcagcagcacatttttttacttggcgctaaacaacactcgcatggaccccgtgactaatgtcgccgtgcccgatccgtatttttttaacaaagacgacttgggggtcatgtctagcaggggcgccaattcaatagcgggcatgtcgcgtctgcaacgccggcgcgtttctatacaggatttgccggccaacgcgatttgtttgggcgccatcaacgaaattgtcaagtacgagggcggcaaggtgctgcaaccgcgcgccggcgtgtacgagcacgcgttttcgctcgattttaattcgctctatctcaccatcatgatcgacatctgcgcttgcctgaccaacctcatattgtgcgaagacggcaacgtgtacctaaatcaagataagcaagcgatcaacgtgcaactactgctgcaattgcttaaacagcgcagcgactttaaaaaatgccgcgacagccagacagagtcgaaatttttgtacgacttgtacgaccaaatgcaaaatctgagcaagcgcacggccaatagcatctacggctactacggcattttttgcaagttgctcgccaattacattacgagggtgggccgcgaaaagctgaccgcggcaattgatataattgagggccttagcgacgacccggagttgttgcgcgagtttaacctgtccacactaacgtttaaagtgctttacggcgacaccgactcgacgtttgtgttgcccgtgttcaaacgcgacgagatttccgcagaacgccgccccaccacgctcaacaacatttgcgcggccgtggaggctcgcgttaaccacatgtttacaaacgggtacaaaatggcgtttgaaaatttaatgaacgttttaattttgttgaagaaaaaaaagtattgctacattaatagtaccggtaaaattacttttaaagggtggctggttaaaaaggatatgcccgtgtttatgcgcgtcgcgtttcggaccgccgtggagcatgtactacgccatcaggatttgaacaaatgtttagacagtcttaaaagagacatgttgatgtattttgacgcgtttggcaccaccaaaccgctgaccgactacagttttagcatgacgtacaacgacggtgccggcaaagcggacaacgacgagtcggcgcccaaaaaacggcgcgtagtcactgttgcgcgacattgccgcgaaattctcgtcaacaaaggcacagattttgtgcccggcaacggtgatcgcattccgtacgtgttgttggacatacaaggtagtgtcacacaaaaaacgtacccgttgcgtttgttcgacccccaaactatgcgcatcagttggctcaaacacatgaccatcttgaacacttttatgaacgagctgctggaaatatttggggacgagcacaaggacgcgctggccgagtgctacaacgccatcctcactaaatacatgcaacaccaggcgtacgacaaaaagcgcgccactttggtcaaaattggcgcaacgcgtccacgcaaagcaatcgatcacaaatgcgcgtcgcgcaagcgaaaagcagtcagcgatgacgaagaaaaggaagaagaagaagaagaagaagaaagttctaataaacttgacaacgaatctaaatgcgcaaataacacgtttaaattttgtttgtacaaaacgttgtaaattaatatgcctttgttactttttgtatataaaattgcttattaaaaagtatttgtgtaataaaaatattcctctgtaatatccctcattaatgaaattcttattttatatttgtttttttcagagggtggctagccgccctctgaaatgtttaataagtattatatattataatgaacaattttggcgtatttttatttgtgcttgttctggcgcccgcggtgcgctcgcacgggtacttgtcggtgccggtggccagacaattcaaatgcttcaacgacggcaactttcattggcccgacaacggcgatggcattccggacgaggcgtgccgcaacgcgtacaaaaaggtgttccaccgataccgcgccataggcgcgtcgccgggcgaagccgccgtcgcagctcagtacatgtttgagcagtacaccgagtatgcggcggtggccggccccaattatcgtgactttgaaatgattaaacgcaacgtggtgccgcacacgttgtgcggcgcggcgtccaacgaccgcaacgcgctgttcggcgacaaaagcggcatagacgagccgttccacaactggcggcccgacgtgctgtatgtgaaccggtaccagcgcgcgcaccccatgaacgtgcacttctgtcccacggccgtccacgagcccagctactttgaggtgtacgtcaccaagcctacgtgggatcggcgcagccccatcacgtggaacgagctcgagtacatcggcggcaacggctcgggtttggtgccgaacccgggcgacgcgctttgcgccagcgggcagctctactctatccccgtctcggtgccgtaccggccgggcccgtttgttatgtacgtgcgctggcagcgcatcgaccccgtgggcgaaggcttctacaactgcgccgaccttgtgttcggcaccgagaacgacgagtgccagtacgcgcgcgccgccaaggccgtgcgcgaccagctgcggcaacaaaacctgtgcaatgattgtgttgaggcggaccccgaaaagtcgtgcgcgccgacgtggcgcgcccacaattatttgcgccgcggcggtgagcacgaccaacaggacaatgacgccaccgtgcgcgagaccattgacgaattgtgaaacgcgttgtgagcgttaatgcgccattgattgttgccaaagtaacacgcgtttaaaaaacaaaatgtcgcgagtaaaagttaatgagttcaagttcggcgaggacacgtttgcgctgcgctacgtggtagactgcgaccatgtgatcaggttcgtggccaaggacgtcgccgccagtttgaaatatgtaaattgtaaacaagctgtaatagttaatgtcgacgacaagtacaaatgcacgtttgagcaaaggtctacgccatatacccttgcttcggacagcgtggccaggcagggcgacccgctgtatctgcacccgcacacagtgctcgtcaccaaggagggcgtcatccagctgatcatgaagagcaagctcccgtacgcggtggagctgcaggcgtggctgctggaggaggtcattccgcaggtgctgtgcacgggcaagtacgcgccggccgtcaagatggacacggacgaaattcaagagacaaaaaaactggacgcatacaagcgggacgttgcggaaaaggacgaaaaaattcaaagtttaaccacggccttgatggagaccaaccagcaggttgtcaaatttgccaacgcgttaattgtggcaaacgaaaatttgatggccgccaacaacagccttaaaacggccaacgagaatctagctcacatggccaaccgcatggcggacatcgcgcaggacgtgatcgccaagccgagcgatccgcagctgttgcactcgctggccgtgtgcgcgctgggcaacgaccagtacgcgtttgtgcgcccgcagaagcgttcgctgcagcgcagcctgaacaggttgtcggtggacgagggagacattgtgttccgcagcgactacgtgcccaactcggtcaacgtgctcaacaaggtgaaagaaacgctgccgcgcgacaagtttaaggccaagcacaataaaattacgctgttaaacaatctgacccgggaacagctcgtcgaggccgtgcaggcgtccatgaccgagcgtcaaattgcgcgtttggccaacaacgcgcaacaataggcggcaaagtttttgtcgacgcattattgaagttttttaatttaaatgaacatttggcgaaattatattatattaatgttaacattagaaattttgaatttaatatcgtgagtgcttcaatttgcggttaagcaccccttgcggttgtttgtattttagacaaaattaagttttcaaacattaattactctttattttattgttaaaataaaacgctttattcgagaataaatgttttattgtcttaactcgcttaattagcaaaatatgcaaggcacgttttgttttacaatacaatcaatctgctaattgcggcgataacgttgctattcaataaacagatccaacaagtgttcgggaaacaaatactcggacggcagcgcgcaaatactggcaatttggcggtcgtcatttttgtaacatatggcgttgtttttaatgtataaattttgcagcacggccgtgttgtgatagatgtccgcgccgcacacttgcaccttgttgtgcgacgagatgtagctgtttagactggtggtggctcgcgtggacacggtgtcaatgtccgtcgcgcgcgtgcttgcgtactggcgcgtgcttttaattaggttggcgctgcccttggcaccgctttccaccatatcggtgaactgtccggccaacccaaacagctcctcgtcgccgcacaccatttcctcatctttgataagttcagttagttgcttaaacaacaagtagctagcgttggagctggccacaaggcaaaaatctcgcaacaacatttccaaacgagcggagaacttaacgtcggcgtgcatgcgccacaacgcgtgcgctaaaggcattgtttttaaaagacgttctacggcgtcggcgtttttgtacaagtaaaaaatttgctgtgacacaaacgtcaagcggtttttgtcaaaacaaatgaagctgtagcgcgggtcgccgtacattaagcattccgcgtcgatgagcgagttgggccgcggcaaatatgtaatgatttttttgtccccgtcgcaatcggtgttggcgccgggaaaaatgcccaatcccactttgatgttccaatcggtgtcgcattcgttgacgcgcacgtccgacacctgcgtgcttagctggctaatgttggggtggcgcgtggtccacgcgcgcgcgtgcggcacgtcgcgcccaaagtaccgccgcacgctgtgcaacggcggcatcacctcgttcaccccgttcaaacattgcacgttggcgtaaaaagaggcggtgtttaggaacgtagagtacgaatattgcaccgcgtacccgtttttgctctgcaactggtcttttataacgccgtgcgtcaacttaattttttgcagcgcacccgaaatgtccacaaggctgttttcgtgttttgaattgaacgtgttgtttaaaaacacgacaaaattgtagtcccacaagacaaaattgggcaaaataagatagtctattgaatcggtaaatctattggtttttaacttttttaaaaacacgtttgaaggcaagtctgtgacaatgacacatatagcgtcaatgattttaaccagggcgtcggcgtggacgccggcactcccgttgctgtacacgtttatcatttgatccatgagactattaaaataattggggcgttggttttttttaaggtcaccaattaacgtttttaacacaagcctaaattcatcgttggaaaaaaacgccacattgtccaattttgtaggatccaaaatgagatcaaactcggtggcgggtttgtctaaaaacaacaccatgacgcgtgcgtgttactcggtgttcactactataagagggtttacaattacaattgcggcgtcatggaccgttttgaacagctgatcaacgtggcgctgctcaaaacgctgattaacgcgcagattgacgaatcggacgacatcaaatcaatgaacgtgaaactaaaacagttggaacgcgaccggttaatcaacagcgtggaggtgtacggcgtgcacgacgcgcgccttcccaacaaaaaagtgcgaacctattaccttaaaaaaatttgtttattacttgacctaaattttaaacacgttcttgattcgtcgttttacaaaaatcacatggtggttaggttgtgcgacgcggcgcgcgccaaggaatggcagagcaagtcgcgcgagcggcgtttgaaaaaccacaatcttgacattgattttgacgggcctattaagatttttgtagccgcgccgccagaacaaaaattgttgttaaaaaaagcgcgcgacgcgctgctgccagtgtacaaatacatttctatatgcaaacatggcgtgatggtgcgtcgcgacgaaaaaagccgtgtgtttattattaaaaatgagcagcatatcgattacctcaaaactaacaatttgtttgcgtttgataaggaaagcgcatttcaagcaaacgcacaacgcatgttagaaaacataatttaattagtattaagtagattattgatcaaattatattttatggttgtgttcttgccatccgtccttctcgggtaataaataaaagccattaatattattattgtctttaattaatatgctaccacaaaagttgcacaatttgccgcataacggtaagaggatattttacaaattctacgaccgcagtttgcgcaaattcggttccaaagagattgccgtaaaattggccgtttgtgccgttcgcaaaaagtacactctcatcgacggtcagtggcgagcgcgtcccgacgccaacgaagccgacaccaccagttcgtcttctgccaccaccaccaccagttcgtcttccgacgaatcggacgaaaacaattatgtaccatttgcccgacacgctgtatgaagaagagaaaatgccgcgccgcgccaaaaaattgtttgtggacactttttcgcaccaccacaaactaaacgccggcgacgaggatgtggcaatgcaaaaagcgcgccaagcgctggaagaacgttacgtgcgtgttaacgacttgcagtggattccgcggcgggccgcctacgaaataattcgcgatgccatgtcttcggacagcgaccggcccgttgcggcgtcgccgccgcccaccgaacgtcgcaacaaacggcgttcaaaaaaagacaaacgccgcgttagtccaagtagtaatagcagcgacagcagcgataacaacagcaccagtagcagcaatagtgatgacgagcttgtaagtactactactactatgcggccgttgtcgaaaaaaaggaaaaaagtcggcaaggtggttgaaagtcaaaagtttggtaataaaagtgcacggcaacaatacagcaccgacgacgagtattaaataacaattttacaataaatttatttttaatcacacaaacaatacaattttatttctaattcgcggtccaacgcgttccgaacaatcgggttgttttcagcaacggcaaaaggctggtggcggcgttgaaagtccaaaaagccgctaacgcgctggtggtagcgctcgttggagcgcagttgtttggctaccacgatcctagcgtttggtcccaaatcaagcaccagcgactggtctcggtctgaagcgttgaaacttatgtagttagcaaaatcgggcgcgcgcggcaccgcaacgccgtccaccgttaattgtgcattttgatacacgtgcagcgcaaatgtctccaaagacatgtcacacgatacaataaagtttttgtaaaaagcacgttttacgtttaaaaacactatgtagtggttttcgggctggccgtcgtttaactcaagttggctcaagtctaagattacgttgtcaaattctaagcgccttgcgtgcagagaaagaatcattgtgtacgtccactcaacagactcgctatctaacataataaacacggcgtctgcgtgaagattgtatttatataaacctctacattatatattgcaagttaaacacgctgttattaattcaacgtaaggttcgttttcgcaaatcacagtaaaattgaaagaaaaccacaaatatttgacgaaaacatttattaacacaactgatagtagagagcgggacaatttgtgtaatttaaccaagttttaggttgcgttacggcgaaattgtttgaacattggtcggcaaattgttcattatactttatgtgcattcttgtgtagtctgcgacggcaatgtggccgggcgcgacgaaataacatcgaggacacaacactacattttcctcgcggcgccgctcgccgtctgcgagtttgaagcgacgtttcagcgcgcgaagcatgctaacactttttaattaatttgtcaatcacagcgtaatcccttttgcccaccacgttgtacgtgctgtgctgccccacgcgaattgcttcaaacgttttgtaatattcgctaaggttgggctttgtttgctcaccgccaaaccgatacttgtacttatcctccacggtgctttctattatttttcccaacgacacctttttcatgttaacaactatcggctaatcggcacagataacaatgcttgttcgacaaataggtcagccgttaaatactagccgagcgcgcgctcggcggtacgccaaaatagtccataaacgcggagacaaagttgtcccagtccaacaagtttagaggtgtcacatcgtccggatgtaaatcacaattaatgttttctcgtaaattttccgagccggcacctgttgtcgcgtctgacggttgcgcaattaaagcgctgtaccgtaggtctttgtgcgggttcagtgcccaatttacgtagctataaatctttttaacaatggcgcgcggcgggcacatgatgtgtcccggcggtgcaccgccgtagctcaacttgcagcagttgacgcgttccgggttgtccgggcatttgcccaaggtgcgaagcaacaccgacacggaagtattttcgctaataataaacgggttgctttgtttcaatattgtcgtaagcagagtagcgtacactaaaaacgtttgatatatgtactgagattggcgctgccagtcgttgtaacgcgcgtcctcgtccctgttggcaacagcgacgtaagatgcggtcaaaatttggttccacggcggctcgacgcgtcgcttgcaacgttcgttatcatcgttgttgtcctcgtcgtcgctgctgtcaaccgactcacacgcttgtattaaaacgtacgcgtgctgcggcagcactacgacgcgaaattcggaatacaccaaatcaattattaaacggtcgacaactaacaaatactcgtaagcctttacgttgcccaaaaaatccaacagcgtgactaaaatggttttaagagtactcatgttggtttcgcccgcttcctcaatacttttaaattgctcgctgggcgccggctcgattaacaaacagtcgtgcacttggcccgcgtttaggaacgcgcggcgcgctgcggcggcgtcggaccgcttgcgcaacaaccgcttgtaatacggctgcgcgcgctcgtccaaaaaaatgtcgctgtacacggtcatgtgtagcaaaccgctttcgttgcgctcgtcatggtacgcgttgcgaagacgttgaactcggcacgtcgctcgtcgaggatgcatccaacactgcatcttggtcggtcgtatgggcttgtgcggcaccaatttcaccgaggcacacggattcaacttgaccggcttcttggtcgaacacattgcacataacgtaactgttaccaaccaaaaacaaattgtcatttaacacacacgctatcaagtcaacgtccgccgccgacaacgcgtgtgccatgtttaaaaaaacgtgcaaaattaagctccacgtctagcgcgtcttcggtagtgaccctaacgtgcacggctttgtacacgccgtccatgtcgtcgtctccaataaacccgcgcgtgagttctaaaagcgctttacattcgtgcagcgtcggcggcggaaacgtaaaataatatttaattgcgcgattaaacgggtctcggttgcgctcgcgtctccagcgttcaatgcactcagcgtgaaacattttgtccaagttcagcaacccgttgtcgggcaccccgaccacaccaccttcaacgcccaacgtttcgaaacaaattcgacattcggtcgtgcacgacggccaaatgtctttaaacaatttatacaaataatattgtctgtcttttaaatgaacagtataaagcatagtctttgcgaacgcgcccttatgcaataacaacaaacatgtaggcgttgcggccgctaacaggtgtcacgcgcgaagtcccaatttgtgtctcaaaggaatcacaatataattgacgggcgtgaaatcgagtgcgcaataaatagtgtttattcgacaataacaacccatcaaattgtgtttgatatacgtgtttgtggtattgtcgcattttaataacatacagccgtacaagttaaactttttacaacgattcagtatcagttataatttcgtacgacaactgtttgttcgttatgtttggtaattgttggtaaaagttgttgaggcgactttcaatgttgatgatttggtcgcgcaacttggcatgcaattgcgaattgtaaaaatttttgagtatgtactccgtcacggtaaaacgtttttgatgcgatttattatcttcaatagcttttcgctgcccctgttgtgttttgtactcgacaatggcggtattggtgtcaatgtcgcaaacgtacacgtcgacaatttcgccataacctataaaattgtcaataataagctgttttgtttgtgttttgttaaaattctgctcgtccaacaacgacacccacgtaatcaaaatgcgattcatgctggtcggccgcaacgttaaaacgggctgggctgcaagccaattttctaacccttccgtaagtgtggcggaaactgcgatgtttaaactgttggacagcgcgcttaaatcaatttcaaaaacttctattgcgtttgtcaaattagtttttaattgaataaaattgttaataaaggcgtcgcaattttgtaacatttcgtttttgtgaaacgcaatgttgttgtaacgccgtttcttgttctcgtccataagaacggatcgcgcgtgttggatcaaaattaacacatcgcgaacggcgttattaaaatgcatatccgtcacgctggggtatttgcgcacctggttggtcacaacgtttgccattctagcaacaagtaaagcaaatttagtgttgtctagcattgtacttttagtttcaaaatcaagttttaacgtttcgtaataattaatttcctccaacgagcaataccctaaaaaattgctaactttaaaactacataatctgttttgttgtttaacacgtttgacaaaatcgatttcctcttcctcttcttcaaccgatttaacggcgccgcgcttgcggcttcgcgtaaacgcagccatcggcagtgttcggcgcgcttgtcaagatgacggacgttgtgcaagattttgacgcgctgtacgccaaattggaatcgccaccgtacaatttaaaattggttctagaatgctgcgcgccggaagtgaactcgttaaaatttacggccatacaagaacgtaagtcgtacgcgtgttgcgcccttaataataggggtaattgtgtgttgcacaaatgcgttgtggtggtgttgggcaccgcgctggacgcgcggttgcgagaggcggacgtcgagtttgacgcgcaaaacaatttgcgcggcacgttcatgctcgacggccgttttcttagttttcccaacattatgatgaacaacaacgtgttgatacataatttttacgacaaattgtacgccaaacattgtaaacgcatgtttttgtacggcaacgtggacgctgagaagcacattaaccgtgccatacaactagtatacgacaaacaaaacgacgcgttgtttgctcgcgacgtgtacgctagcgattacgtcgttactaacgacttaaacgcggtactcgaaacatatttggccaacagtggcaaatggcgaccgctggattttctatttcagtacagcaaaactcacaagcagcaactggtaacgcacattaaaatgatcatgaaccacgaaatatgctattcaattgacaatttggccaataaaataatatacaagcacgcgtatttaatggaattgctgttgacatcgatggtgttgcagcactatcaaacgtgcgttgacgaatgcgaagcgccaccgttgaagcggcgcaaaacgcaaactgtgttgtacagtaaagagtctaaaaaaattgtggacagtgttgtaaacgggcggctaatctattgtgtttctaaaacgtttagcaaacaacgacgcgcgtttccaaaccaacacgacaattgcagcaacaacaacattgaaattgctttgccggtattaaaatatcgggtgggctgcgaggtcactcgcatcacaaacgacagcgtgcgccaaaaaatgttaaaacaaaaaaaagactttgtcaagttcatcggaagcttttttcacggtgaaatgaccgtagcgggcaaaaaattttttctgtgtcgcaacgcacggctacctaacgttgattatgctatggtggccgacaagtttgccgagctgctacagtttaatttggttgcgccggttcacgacttagcacactgtgacaacaacacgcttctcatcgcttttaatgatcggccgaccaatttgcaatgcttgcgcgctgatgtacctaaaattgtttaccgccttaaacgcaaccgttgccctatcgaactaaaagtgtcccaaaatattttgtgtgtaaaccaccacgagggcatggtgtgtatagcgaagaaggtgcgcatattagcaccggtggacgccgcaatcaacgcgctgttgacgccatacgaatatcactacaaaaactcgctgtttcacacgccgaccgtcggcgcgtgtcaaatagtagaaaacgacgacgtgcgctgcctcatgtcaaaattggaacagtattattttgccaattacacgcacttgttttacacaattccggtaccaaaaatgatagtggctttgactaatttaaaaaacgcaatgcccgtgttgcgctacagcacgttaaaagcggtgcccgccggcctgtccgtggcggtaagcgacaatgtgttcatgaacaacaaaatggtgaagctgtggacgctcgtgcgcgattcaaaactcatgaccgctgaagatccgtatataccgcacttggcgctgcctattcgcttgtacaatcacaaaattaacaaactaaagggaaaactcacgttagcaaataaaacgatgccggtgctgaaatttgtcgttagcaacgggccgcacaattgcgttgtgttgccggacaacatggtgcaattttttgcgggcacggtgttgagcagcgcgaaaattgcgtgggcaaacgacggcaaacggtgcatggtcgaagcgtgcactaacggcgcgcacaacgtgtacaaggtgtacgtgtttttccggcggacgcgcaaccaacaagtcgactcgctcaccgccagcatgacgcagacgagcgacgcggtgattgtgcgcaccacagttatcacgtccaccgacgacttggaaggtgtcaaggtgtgcagcgtgcacgggcaaaagggcgtacttaaccgaagcgaggatctgaccgaatggatggccgaagacggcacgcacgcgcagatttgcttgtcgcccgtgtcatatttgtctcgtcagtccaactttgagcaaatagagcgaaaatacgtggtgcgcggcggcaatcacgccgatccgcacgcgcagcgttaccccatattttacatcccctacatgttgttcaacaacactcccgacaacatttacaaagagtttaacaaaaacaattacacgggccacgaaaaggtggagggcacacgtttcgaccaatggactaaaaaccaatcgtttgtgggcaaccggttggcggaaagtttgcagtggatgcgcggcggctccaatttaccgcaaaactgcggcgagttcaatgtcatgtccagcctcttgatgtgcaacaatgccgttatgaaataaaaaagcgcaagccatcaccgtttgcagccacaaccatggaagttacctttgcaaccgccggcagtctcaaaaacattgtagacgcgctgcgcgggctgctgacgtacgccacgtttgactgcaacgccgatggtttgcatttgcaaagtatggactcggaacacgtcgcgttggtggatttgcgtttgaagcgtgccgggtttgcacgttacacgtgcgagcgcaaattgtcttttagcgtgcccatgcgcggcttgcacaaaattgtgcgcgctgccactacaaacaaacaactaaccatgcgcgccagcgcgcgcgacgatcaagtacattttgcgtttaagaccgcggagcgcacggtcacgtgcgcgttgtcacagattagtcttgatgtggaacgattgggcgtgcccgacgacgacgagtacgattgtgtgctggccgtggccagcgacgcgtgggcgcgcgtgtgcagcgacttagcgcagttggacgcaaccgttgtcgagttgtcaagtggcgcggcgggtttgtgttttgcagcggacgcgggcgacggcgtgcgcgccaatgtgttgctgcgcgccgcgccacggcgaccgctcacgcaagcgtttgcgtgccgctacctaaacgcgtttggccaaacggcccctttgagcaaatttgtcaacgtgtgcatgagcgccaacgcgccgttgcggctgcgcttttgccttgagcggctgggcaaactcgatttatatttggcgcctcaggtttccagtggcgctaaggacgggcagtagaatggacgttttgcataacttgcgtgtgcgcatcaacaagcaccacacgtgccgccgcgcgttgtttgaaagccccaaccgcgcatcgttcacgtttgaccgcacaaaagccgacgcgcaaattgccagcattgaaataagcggattgcgccgaccgtacgaatgctttggtaaaataatggtggcggaacgtgttgtatacgtgcgcgaacgcagcacaagcggtaaaattgtagtgctcgttaacggcgccgccgatttctttaccgccgtgctgaagaacggattagattttatcaaactgaaagtgtacgtcacaacgcgcaattaaaattttcgtataaataaacgacggccgcgctaggtgtttattgaaaaacatggattatcggcgagaggtgttaagcgagcagctgcaagagctcggcgtggcggcgcatcaattggacgcgcagttggccgcggtgcagacgcgagtggcggccgaatttaagtgcatgggagtcagcgacaaaaatggcaacattcgcgagtttctttatcgttcagagtgtgaagacgcgcagcgcaacgcgcgcgttttggcgttaaaaatagacgcaatacttaacaattggaaataaataattgtatttaaaatgtttttcattttctaaacttccagccgtactttgtatttgtcattaacttattatgtcgaatttaaattgtagagtagataaactgttgttgagtttaaagccgttgccgtacaaatagcaatttaccggcgtgtactgcaagctgggctcatcaatagcggtaaaagcgttgttaataacactcatgggcaccaccgactcttcgttggcggacataaaaacgacagtggtgtcttctttcaacattagccacgggtacgcaaacaaagccttaacgcccgcgtttgtgtttacgcacacaacctcttgcatgttaacgcgatacgcctgtaaattgtccgagtgaccttcaacgtttaatttatagctagcaacggccgaagccgtgtacatgctttgaaaactaattatttgttcaacaagttctacgctcgtattaggacttcgcactgtcaacagaggcacattgaagtttgtaattgggacgcggtgacacacgaccccattgaacgccgaaccgtcggacgaaccgtcgttgttaaatcgttgcgtttcgaagggcaaatcgttggtgggtgccgaagtgtcgcgactaagcacaaccacgcggccgttaacgttgttcaacgaattcggttcaacgccaatattgtaatacagttgaaacatgccgtggtcatagaacagtgtacacgatttgaattgcaaattgttcatttcttcgtaacgcgcatgtattaaaatggcgcccgcagtgcgcgtcttggcaagcgctgttttgccaacggccggccggaacgactgcgtggacgtggtagtgctgggcacgcgcattacgccgtttaaagattgaagaataacgcccgattcaaacatcaccgtgttgacgttgtagttgatgacgggcgcgcggcggttccaaatgcgccgggccatggtccaaagtggcgcttgcgtgttgttaatcgggtccgcttcgtagtacgctagtcgcgtggtcgcgcccactacggcgccataatacgtgtctgacaatttagtcagaactttcgacaaatcggccgaatggacggcaattgggtaatcaataaagttaccaatgacattggaatagagcgtgccgttgcgcgacataacgcccggcaccaccacgccctcgggactgcctacattttcaattgcgcgcgtcaaaccctggatgttgaccgcatttttgccaaacaaatacgtgtagtatgccaatgtgaaaaacgagttaattatgtgcccataagcgcgcacgtcgccgtggtcgacgtgaatggaatcgaggtgcagcccgttgcccgtagccacgtgcggaaaagcgacagtaattagcatttcctgcacctgcggttcttgcgcaatttgttgcaatgaatagccgcgcaacaattgactgtacacgtacggtacacccatgcgcattgcgttgccggccgtgcggcgccaacccatcaaatgaacggccgacggcgaatacaatcccagccaatattgagttagcgccgcggcctcttcgtaatgcggcgtctcgttgagcactatggtcacgttcataaacacctccggcattgtgatcaaaaaatgataccaatcagccacggttccccaaggcgcttgctggtgcggtggtgggtcgggtaggcgctgacatattgcgcgcaaaccgttaattaaattgcttgccaattcagggctattgtgtagcacgtcggttaaattgttgtaacgtacgcaatatccaatcaacgtgtggcacaccgtgccaaaatcattgaccgaagtccacgggtttaaattgtcaaatattgtttcattgttccaactgcgcgtggggttggccaccttttccgctttttgagcaaacacatgcgtcaaagtgtttttaaaataacgttcaaaatttaacaattcaacagtatctgcttcccacgttaagtctaacaaagttggctcgttaatattttgcgccgagctgttatttaaaaataatttaatgttagtgacgctgttattgcttgtgcttgcaaacaaacatataaacagcaccacgatcagcacaacaacaagtggaaaccacattatttattaaataaaacaacaatggcaatagctgtatttatttactatattctaaaccttaatttaaatacaatactgcgtttacatttaaacgccgggctccctcgtaactaactttatactcgttgccggtcaaacttgccgttgccatttttaagcgttgagttgcaacgttggcacagcacaacaccgccccgcacaatcgccatgcgtttgcggtacagcgctgccgccattatcgatgtgtgcgtaaactggcgtttatacaaatacacaagctcgtcgcacacatagcaagtagcgtattgtgcgttcatgcttacaagctaaaaaactttttaatgtcctcgtaattaagggctgaacgatcaaacaccttgttgacaaacgtgagttttttgtcttggcgcgcttttatgtaacgctcgatgctgttctcttcgtccaccaacattttgtacacgtaggtgcgtttcttttgacccatgcgatgtatgcggtcttgcgcttgcagctcaatttgcgggttccaatgcggctccaacatgattatgtgattgccgccgaccaaatttaatcccacaccgccgcatttaatggacatgagcatcacgcggtacggcgaatcaatggcgttaaactgattttcgacagcggtgcgttcctcgacgcgcaactgacccgtgtacagcaggatgggcacgccgcggtggcgcaacagcccagccacgatctgcaaaaattccacccattgtgacaccaacaccaccttgtcatttggcgtgtccagcacgcgttgcactagctctaacgcgccgcggcatttactgctttcgtaactaggctcaaaaatgcgcgcttgctccgtaaacatggccgcgcacttggtcaacgtcgggtggcagcacatttgacgcaagcggcacagcagccacagcacgtcttgcatgctgcgcagtttgtcaccgccggcaacagcgtcatcgtacgcgcgctgcgactcgctttttaacgcgttgtacacgcgcttttccgcttcgtcaaacttgacgtgcacgtactcgacgttatgctggggtaggtttagagcaatttcagttttgttgcgttttaacacaattttgttcaccacactctttatgcggttggtgtcgttgttgcggttaagcattctccacacgcccacgttgtcaaacgggcggcagcgcaaaaaatggataatagcgtacatgtcccagtggcggttgtgaatgggcgtgcccgtaatgcaccaacggttgtcggcggtcaatgcgcacgccgccgcgtgcacgcccgtttggtggtttttaatgacgtgcgcctcgtccagcacaactcgatgccagtggcgcgacattaaaccaccggcagggtggcgtttgtggtgcgcacgcaatgtatcgtacgtagtcagcaccaccgtaaactcgtcaaacgaatcgtttgaatcgtcacatccgtgaaattggcgcaaactaatgtgcaagttgtgttttttaatttcagcggtccaatgatttaataacgacagcgggcacacgattaacgttttgtgcgcgtcgttggcgtcgttggcgatcagaattagcatggacaacgttttgcccaaccccatgtcgtcggccagcacgccgccgtgcgggcgtccgcgtttttcgcgcctttgcatccattgaatgccgcgcttctggtgctccagcaggttgggcgcgtccaaagacggcgcgtcgtccaaaccgtcggccgcggcaaaaaattcctgcagctgcaatttaatgttgtccattggggcggctactcaacacttgactgcgcaatgacctcttccacgtgccgttcaaaaggcggcagataaaattgcaccgccgcgtttgtgcgtaagcgtgcgcacgaacgcgcaaaatccacaaaatacggcagcccatcgacgtgcaagtcgtcaacgtacacggtcagtttaatggcaagcacgccccgaaacagcgtgtagttcatgtacgtgtagcgcggcaacgggccgctacaacgttgcgccaaactttcttcaaagaaaaaatgcgccaacgcgcggcacgggcgttgaaatgcagcaatgcgtacgcgaaaagaggcaaacgcggccgtgttggcgcgaccgcacacccacgccgcggtgtcgtccgccaggcacaacgtggccgcgtccgcgctcgtgcacacaccctgtttggccattaaatcgagcgtgcgttgcatcattgcagcaatgtcggccacgtgcgctagccgttttttgaattgatcgtcgcttgcgatggccacaaattccatgttcgcgcaagtgctgcactacacgacgcagtttttgccggcggcgtgtcgcgttcacgacgaaacttttttgttgtacaatttgtacattagcggtgtggacgtgcgactgccgcggtgtgtggttcgcaatgtgcaagttgacgcggacggctttgtgcggttcgtgtttgaggtcaaagttttccgcattgagcatttaacaaacgtgattagcgccacgcccgaagacgtggacgattatgtggacgtgacacgacgcgagttaagcgcgcacgacgcggccatgctgaagctcgtgtgccgcgaccgttggtataaaggcgatgtagagcggctgcgccgcatcctgtgccagccgtgcgtgctcaatttagtcaagtttgcgtgcaacgcgatgtgggagcgcggttacgaagaccactacacaatcggtcagcaattgagcattttaatcaccaccaaactgattcagagcggtttggatttcaaacaccagcccgacacggcgacgccggctagcgtgcgcggttggcaagacgcggcttttgaaaaatatctgctatcgctttcttcggtcagcgaaattgttaaacggcacgtgttttcaaaaaaatacctctgtttagaagtggctgcggcgcattggcgcgccgttgtgcaagcgttgcaaaacgaaaactttcaattagtgtttaacacgcacacgcctcacgtactgttaatttgtatcgacgatgacaaaaactcattgctgtatttgcgcaagttggtacacttgctgcaagcgcgcgtcgtaaacatgctgtttgccaccgacgttgagttctacatgcgggtcaataatttcatgttttatttatacaattcactaaaattttactattattgtttaaaaaacaagtacgcatttgaaagtgttgacaaacccactctgtttttgttatacattattattgcgctagaatggttcaacaaaggccatttaaactcgtttacgctggaaaaatcggcgttgtacaacccgctggagctggcgacgcgtcgcctcaactctatcaaacgcgccgcgcagcagaaccgtgttgtggaatgcgacagtgaaattggcatcgactacattcgaggcaaacgtgtgcgcaccggcacgcactatggccaacgtgtcgtgcaattagattaagttatttaataaaacaattaataattatgttatgtttatttattgtacaaaccaaccaaatactccaaagtgcataaatgtttgatggcttcgcatttgcgcaacaccaaatagtcgacggtggcgtttggcgtgtttaacgagcgcattgcaattataaaccgctcactatgctttaaaaaattatcgtacgcagctgcgtacactgccaacgttttagtcgcctcgtatttagaaacaaaataggtcaaatcattgcgcgcacacacgcggtttaactcttgcgtatcaatatctatatcggacaaatcgcgcacaaactttaacttgtcggcgtcagacgcgtctgccactgatatcagcgcttccaattgctcaatttggccgtttatatcggcggcaagcatcagcattttttcgtcgttgttttcactcggcttaacaaaatatttagcaacttttttatcttgttgtttaaacgaggcgtttaacattgcgcgctctttgtgcacagccgcagcaaggtcggtttccattttattttaacttattagggttcaattataaaaaacaaagcaggtttcaatgccagcgagtacggtttttcgctaaacttgcgtccgttaccgtcaatcatttgaatctctttgccaaatttaacaccttcaatgtggccgcaaattaacacgggcacttcttgtgacgccccatctgtcttgcccacttcaaacaatgatcaaactcgtcaacgtcacaggaaccacttctaacggcccgttgagttgtccggtggagtaaatttgcaaattgttatcgcggcgcacccacaaaaattggcgcgctataattctacgctcgtgctccttttccggcaaatgaatgcaaacgctcgattccagcttatgcggaaacggtcgttcggttttgtcagctttatccataatttgtccaaatacattgttgtgttcgtgaatggcagagtaggttatgcttaaaaactgtccaaaattactctttgagcggtgcacgctgccaaactctgatatagtaaacccgttgggactaccttttacgcgcaatcccattttgtaaacgcatttgcccccaacaggttccactatagccacctcgtcgggaatctcttttttgcgccattcgtaataatttgttcgaccttgcaaatttgtaaaagtgctctttaaatattgcaaatcgttataataaaagttgatcgctgaaaagtcaagcgcttgaaaattgttcagcaccatatgctgccagctcatgttttgttgagtctgcaacgctttaataggcgtaaatttgcgcaacataccgttgttttctacttgcataacaaaaccactaccattgtacggtaacagttgcgtttcttcttgcgcttcttgttccacataagcgcgtttgttttcttgaacatccccgtcgccagagtgcgcgcgtttggttgccatggctattatattagtactgactgtgcgtgtgcaaaaataaggtatttatttaaaaatggaagacactttgccgaacacgtgttcagaaagcgcgttcgcgttcacaactgacgatttacttaaaaatttaccattcaactccgtcaaatgtgcgccctttaaattgcaccattacgttcaactaaaattactgagtaatggaataattgataaacgcgtagaaggaatggacgaattaaaaaaacttaattttaagattgatccggaaaggcgatttatcagcaacgtgctcgactacgaatttgtaattctagaccacgatctgtccattgtgcacgttgtggacgccgaaacgcggcgtaaattaggtcaacttaacgtgtcgctgcaccaaaacgatcgcaccgcgctaataatttcggccacactgacaatatgaacgcgccgttgtacgtgatcaatatgtgcgagcacgatgcaagcgccgaacgtgtgtttagcatgttaatcgagcgccacaactctttcgaaaactatccaatcgacaacgatgcgttcattaacagccttattgtcaacgggtttagatacgcgcacgtggacgacgcggtaatgtgcgagtattgcggtgttgtgattaaaaactggcacgaagacgatagcgtcgaatttgtgcacgcgacgctgtctccgtactgcgtgtacgccaacaaaattgcgcaaaacgaacagtttgacgaaaacgccagcacaaacgtcgtagtggtggcgcccggcaaccctcgatgcgtttataatcgcctggcacaccccaacgcgcggcgcgccaccttcaaagattattggcccggcgcattgagcggcttgacacataaaattgcggaagcgggcatgtttcacaccatgctgggcgacgaaacggcttgctttttttgcgattgccgcgtgcgcgattggctgccgaccgacgacccgtggcaacgccacgcaatttccaaccctcaatgttattttatggtgtgtatcaaaggtgacgagttctgtaattcggcgcgacaagtcgatgtggcgcccgacgaaccggcaacttcacctgtcgttagcgaggctttagaatgtaaaatttgtctagagcgccaacgcgatgccgtgttgttaccatgccgccatttttgtgtgtgcatgcaatgttattttgcgttagacagcaagtgcccgacgtgccggcaggacgtgaccaactttgttaaaatttttgtggtatgatggagttgcaatacaacgggcaggcgtacaaaaaacggtttgttcgggagtttattgctttgatgtgcgccaatgcaaaaacaccttgttgcgccgcggcgggaattaattggagacgcagttcgcgcacttgtttgcgcgtgcacaacgcgcgcgtgtttgaacgtttgcgacactgcagcgaacgctacttttggccagacggcaatcgtttctggtgccaaccacacagacgacaccgcccgcgccggtgtgcaacatggtcgccgcatcgggcgtctgagccgcgcacgctcgacgacgacgcgctagacgattacgccaagacctacggttacgatcaagaagacggcgagcttacacctttgcaccaaaacatcaacaatttaaatgtaaaataaaattattgtaatattttaagtttttattaaaaattttgcaccccaaattctaaaaatttttgtcttgaatccattacgcgttgttgcaaatcttgcagttcaatagtgtttttggtgagcttttttattttttcaaaatgctgactctgcgtggctattttgcgcttggttttgttaatttggtccagctgctttgttaatggtacagcgtcgcggcctttttcggaaaacatctttgttaaatctgtgcagctaaagaagatgaaatttcttttatattataaaaactcattaatattcatttgggtggcaattataatctcataaacattttgtacataatgggggttatcgcgtctgtacgtttgcgcgttcacgttttgcatatggcgtaaattaaagggacaaacttgttgagttgcggacaacaaattccaatttaacaacacctcttcgccgccgttgagttcgatgcggcgctcgcatgtgcgcgcttcgtcgtgctcacgttgtgtgccacacgcttgcacgagtgccattttacagtacgcgtcgcgcacgctcatggtaatgggtataagatgttcgctatccgacgcaccgttgttattcacaaattttccgtatgcacgccaaaccgcgttgtcgtcgtcgccagcctcttttagcaatattaaaggtttttgcgcgcgctgcaacgcggccaaattgacaaaatggccgctcacttgcaaccgattccaatctaatcggtttttgaaattgtcaaacaccagtaacgcaaacgcggcgctggcggtgtttgttgtggtggaagcgtagtcaataaacttgttccaatacgtagagttgacaaaatcacgctcaaacgcgtccggtatgcgttttctgaaataatatgctggcggcgcgcagcccgcagtccatgctggcacagtggcccaatccaaacgcaacgtgtcgcttaacccggggtactcgtcgaacacgttcatgtggtccgcccataacaccgcgccagacgcggctcgcaattcttgcacacgcccttcgcgcaagcaataaataattaacgcgtcgctaattttgctcgtgttttgcatgtacacgtttagatcaattttgccaatacaatgcggcgtgttgatgtacgatttgtccaaatgtttgtgctttgctacggtgataaaatttatgtgatcgcatataggactttcaaaccattcacgcaacattgaatggctgggcacaatacaatcccagtttaaaacggccgcaaatttttgctgcaccgccaacgacaagttattatatttagtgctcacaagttgcaagtctaaacgctcgccaaattggtaaatgaattgttgttgcaaaaagggtcgccgagaaacaagagcccagtttagtttgtctgcaaacgttttggccgtagctgtagttatagcgtttgccgaaacttcgttccaatccactttgtcacaaaacactgttaaaaaacggttgcgattgtagcagttgcgagacacgcgcgtccaaaaatccaagtcttggtaatccatcaaaaacaggcgattcgcgcgcgactctatcgccaaatctattacgcgcatgtaatcttgtttgttgagcgcgagacgtagtgcgcgtgtgggtgccatgccgaagcctatgctgccgaacgacttgtaccgcacaataattagaaaagcagcatttatgccgtttaaacaagcgcccacactgcaggcagcagcgtttgcggccgttttgcaacgcacaggattgtttgccgtcgcgcagactcgatttgagcgccaattgttaaaaaggttgtgtttggcttgggcggaattgtacagtgacgctgtccaggtgccgcattgcgtcacgtcgttgcttttcgccaatgatgaccccaattatgccgccgtgcgcacagcgttaattaattacgcaccgtcacccaacttgccgtttgtgaacggattgggctgcatgcgttttcaacacaatagtttaaagtttgtgggcattttgcgtttggaacataaaaaggggcgagatgggttgatggtgcagaggaattgggacttaatttacgtggaatgttacgtaaccagattgaacgatgaattttacaaccaacttgttcaagaatgtgcgttacgcggcaattgtaatttaaacgtgttattgcacaaattttacaaaaaaacgtgtataatttaataaaaaataaaaccattttttttgttaaaaagcttttttatttaaatcaggcaacgacatactgcaccacgtgtcgttgttaattttgcacgaagctacagacgcattgcgaaacatttgcaacccgttggcggcaacaattgagctggctattgttagcgctacaaggtacagcgtcgtaaccacaccagcagtgacggccaacggagttaagtcacaattgtgcaggcacattgttgtccagccgccgtatagccaacgcgccacatgtaatacgcttaacaccgtcacggcatacagcacgcacaacgccgcagagttatccaaaaaaaccgtttgcaaacgcccttcgacaagttcgccagcactcacggtagcgtcggcaaaaaaattaatcacggccgccactaaaataactttgttgcaaaacattattacagatagcgccagtgcggcagggcggcgcggtggtgcaattttcaaagtgtccaacagcaatcccaaggtgaacgcaaacgtcgtgaatatgacgcaaataccgtgcactgttgcgtgggcagcggcagtagattgtagtgtgcctttgagccacgtgccgccggatccaacgcaatcttggatcaccatttgcggtgagcaaagtagcagcgttagcgtaggcatacccgccagcatacttatttgcaataactgcagttccggttcaggcgatatattatcgttaaattttatcattttaatcaattataaacgtcacaagattagattaaaaagtcaaaagattagattaaaaaacgtttatatacagcacatttaagtttgcgcgttattaaacgagtggcgcgcgcgggcgcgcgtgttaaaatgaacgcacacggcggagttaacatggaatttaaaagtgcacgcctcgccacctacacaaattggccggtgtcgtatttggaaccggaacgaatggccgccagcggattttattatttgggtcgcggcgacgaagtgcgctgcgcgttttgcaaagtggaaataatgcgttggcttgagggtgacgacccagcggttgaccataaaagattagcgccacagtgtccgttcattaacggtgcagtgtcaaatcgagaagagaatgaacttttaacgcaacccgtgcatcccaaatacgcaacggaagttgcacgtttgcgcacttttgcagaatggcctcgtggtttgaaacagcaacccgataaactagccgaggccgggttttattacacgggccagggcgataaaaccaaatgtttttattgtgacggcggtttgaaagactgggaggcggacgatgagccgtggaaactgcacgcgcgttggtttgaccgttgcccttacgtgttgcttgttaagggtcgagattatgtgcaaaaaattgtaacggaatcgtgtacaatttcaaataatgatgaacgcgttgagcaggaagcaatcgaacgccaaccggatttaaacgagcgtcaattcaccgaaaacaacatttgtaaaatttgttataacgctgagaagaacgtttgttttgtgccgtgcgggcacgtcatggcgtgcggtaaatgtgcgtcggctgtgacaaattgtcccacgtgtcgcactactataaaaaccgccgttcgtatgtattattaattaaaacaatattgggtttaataaataaaattaattgacattgtgtttaatttttaatcacataatgttgacatatctttgtattcaaattcaatgacgtctattgtgttcaacgagtgtaataaatccataatataattatccatgtttataaataataaacaaaatagatgtataaaaacgtttaattgtacgcgtaaccaaaataatactgcgccacaacacactgcctagttattgacaaaacgttatacgttatcagtagcgcaggagggggaacatgcacgagcggatttaaggatcgcaactgtttattacatttcacttgttcgtgaaacagtgcagtgttaacttgtaaaacacgcaatgggcacggtttattgtaaaacgttaattaaatttgacgatcgaaaacatgtgtggtgcaaaattgacgattattctgcacaggtgcgggaaaacattggttcaagccttttgagcgttacaaacggcgattcgttgttaaaatggattgaggcatttatgttttgcactgacgcgtctgaaacgcaaagattttttgatgaggcatttgagtacatgcgtagagacttgactaaaattatgtcaccacaagcgtttacttatccagacttaataaaatcacaatataaatggctttcggataaaacttacaaaactgttgtgtggtgcaatcaacaaacgccgcggccaatttattattttgaccaagaatggtttggtcaaaatttatttgctgacgttgacaattatgccgagttgttaaaaaaattaaaaattgtttttgaagaagctcaaaaaaaattaaaaggattgtcgtccaacaacaacgcacatgtttactataacaacggaccaactattatgcaaatacaaacatttttgaacgccgttgcaaacgttgtattgataaccaaaaacaacaaaaaaaataatccgcgccgtgcaaaacgcttggaaaattattatgcgtggaaaaagtttgttacagaatttatcagtcggcgtcgagccgcagaatctaaacgtatggtgtctttcaataaagatttacaaaatcggttattgaattcaatgtattttaaaagtagatgtgaatatgcaaagctattggatcgttatgacggcaacactagttattttacaacacctgtggaagagtgtttaataccagaaactagttttaacgattttttagactacgttttatttacgcaatacaaaccgtttatttgtgaaacgcaaatgtgcttcagcccaaaaatgtggtttggtacaaacagtgacattggttgtatttttagaggacaatatatgcattgtgcacatgaagacgtgcaaggtggccattttaaatttaataaccaaactatgttccaacggtttgtgaatactgatgagttggaaatcggcatgaattggctgcttgaaaatactgaaaccgataaaaatggagtttggcagcggaatgagagagccatgtttgttcaaagttcaattgattacaacgtgctggactttgaaacaattggttttaaaaccggtttactgtttttaacgccaattaacatgtcaaccaacgtaaatcgaccaatcaaattttacaaaattttattaatgatttttacgtacgaattgacacatcattgtaacgttttaatcaataaactacataaagcaaaacaatatgatatagatcaaattcaagcttcaaaagactctagcaattggtacgttttggatacattatttcgcaaaaaaaagatggcgggtgaatacaaatacttggaaaataaagaattcgatcggtacatttgtttgcgaatttacgcgcaattaattaaatatgttatgcagcatataacaaagcatgataccgattttgattgcctcgatttaggtgatgtttgcgacgccattttaacaacaccaaatcaaccaatgaacaaacgcccaaattattatcgtaacttggaatacagcgttgttactgctaccggtgaaaaatacaattttaaaataaaagataccaacgaattattaatgtattgcaacgcaaagtacgaatattacacaatttactggccaaccgaaaacgaacgagattcgctgttaaagtgtgcacggcgcttgtgcaacaaaacacaacccgacttaatggacgaaacgcatttgtttaattatgactattttaacacccacataagtaaaaatgatgaaaaacaagtggacggtaacattaaatggtcgactcgagtcattgaagaattgtatatatgttcatcaattccttttcaaaaaaacagtaacatggagtatttggaactaattttaactgttttgggttttacaaattataattacaaagtttgtaacattacatgtaacgcaatttgttaaataaaaacaattatttaaatgtttaagcttttttttaaattttacacactgcaataataccgcaagccagccgaccacccgagttgcccgtaatcttgctaagcgggttatcggtgagaccaaggtcgtcgcggtccgtgtgcaccaccaagctgcgacccaaaatgctcaacggcccaaataaacttatcacgttgtcggtcatttctattggcgtcagcgcggtacagccgacagagcgcacgttgcctaggtcaccgacgtgtcgctcggcggcgtcgggtgcgccatggtcttggttcgtggggttaaaatgctcgcccgccgacgtgcacccgttgctagtgtcgccaaactcgtgcacgtgaaaaccgtgcaacccgcgcggcaagtttagcaaaaaaccgctaatacttaccggctgttgaggcccttcctgtttaaagtaaacttgtccactaacgtcacccgacataacgcatatggcttgcatgttgctgcggctgcgctaaataagacttaatttaacaatgataaaatttacaacaatatttttaatagcagctgtggctgttacattaagtgcacaatacgttttagcgtgcacggaaactggcaaaaactgtaaatatagttacgaatgctgtagcggcgcatgttccgccgcgtttggtttttgtttacaccgataaataacatttgtatacgtttaaaaatagcacacgctttaccagatggatcgtgctcaaaaagcaagttcaatgctgacgcaatagctaaaaatagcacacgctttaccagatggatcgtactcgaaaagcggggtcggcgctgacgcaattgctaaaaatagcacacgttttaccagatggattgtacttgaaaaacataaccggcgctgacgcaatataacacacgctttaccagatggattgtattcaaaaaacgagttcaatgctgacgcaatagctaaaaatagcacacgctttaccagatggatcgtactcgaaaaacgagtttaatgctgacgcaatatctaaaaatagcacacgctttaccagatggatcgtactcaaaaaacgagtttaatgctgacgcaatatctaaaaatagcacacgctttaccagatggatcgtactcgaaaagcggggtcggcgctgacgcaatttctaaaaatagcacacgctttaccagatggatcgtactcgaaaagcggggttggcgctgacgcaatttctaaaaatagcacacgctttaccagatggatcgtactcgaaaagcggggtcggcgctgacgcaattgctaaaaatagcacacgctttaccagatggatcgtattcgaaaagcggggtcggcgctgacgcaattgctaaaaatagcacacgctttaccagatggatcgtactcaaaaaatggggtcggcgctgacgcaattgctaaataaacataataacaaaaataatatgtaaaatagtttattaatacaactgattatgattattatacattgattattatacattacattggttaattatacatttggttaattagcattattatattgtttggcgcacaaaattgttaaaataccttgcacgcttcacaacatgacatttgcggtgcctataaatttttttctgcttggggcattttgatgcgttggcatagtttattggtgaacgcaaaattaacgtgtacgcgctcatattgcgcaacagtctgcgcttgggcaattgtacgcggcgtgcttgaccgcggtcgtctaacgctacgtacgttttcttgttatcgtaaattttgaacatcacgtcgtagttgttgtccagtacaatctcgttcaaaatgcagtcgctggacagcgcggcggacgcgtacatggctccgcaccggtccaagcatacgtgcatgcacgaaatggcgttgcgaagcagaatacgtccgtaatgatagctgacacgttgcagcacaatatccaggtcacttgcgtcgtttgtgccgttaacaacgccgtcaggtctcacggccaggaagcggttacgaataacaatatgtgttaaacgttgggtgccagttatgtgctgcaggtgttgagaacccacgcacataacagccagagctgcaacaactaggccgtgccaaggcatgctgcgttttaagtttgtgcgaataattcacgccttttatactagttattatctgcattgttatctatcggatgttgttaatctataccgcattgttatctaatcatattgttatttatctatactgcattgtacctaatcattgttatttatctataccgcatttgttatctaaatcattgttgattaaattaccgcattgttatctaaataactgttgattaaattactgcattgttatcaataatgtataatgtattgtattagtgttattattcacatattgcgctaagcggctagctaacgatggtttaaaattttttaataataatttaatcaaaatccattaattcgtaagtggaagtgtctgcgtctaaaccggaataattataactggctaagacgtcgccaagcgattcaaaactggttaacgtctttaaaacgcgtttagcttccggtttgtcgttgcttgatgataaccaatggtaatattcttcaactagactcacaacacccatgtcgctgtttagatgctctacgtacgcatctatagtaacgtcacgggggccgcgataagcgtgcgttttgtgaaactcgcaccatagccaatcagcgtgtgtgtagcacagcctgcagcaaaaaagtttgtcgtgctgcaaaaaatttaaatattctatggtgttatgtttgaggtcgcgccgctgcaaaatgcgaaaatcttcaccgtcgttttttactaactcgggcatcaattcgctttgtcgacccatttgttccaacacgtgtcccaattgtccgcgggtcactttgcgagcttttagcttttccgtcagctggccaatgtcgtgttcgtagctatgttgtgcgcgcacctggactaactttgccaactgctgttgcaaacagttgctttggccgttaagcgttttaggcggcggcggcggtggcctaaccaatgccatttataagagattaaaaatgcaaatttttgtcaaaacgctcacgggaaaaaccattaccgtcgaaacggagtccagcgacactgttggacaagtaaaacaaaaaattgccgataaagaaggcgtccccgttgatcagcaaagacttatttatgcgggcaaacaattagaagatgacaaaaccatggccgattataacattcaaaaagagtctactatacatatggtgttgagattgcgaggaggaaaaccacaataaaaaattaatattatttataaatttattttattgaaaaattctattccgatatgattgtgtcttgcgtgttgtcgctgacatacgacgtcgggggtggcttggcgtcgcggcgttgttttcctgcaattttcttgggtgcgctggccggtgcgcgccgttttttgcttacgggcgttggcacgtagctgggcgatggcaattttaaagcaatgtttttaaaaagttccatgtttttagtgatgagctctcgggtaattacactgtcgtaaatgctgctaaacgctggagccacaccgtttttgaaagtttcgtttagcacgctataaaattcttggtacaatttgtcgcgctggtcgcaattttcttggacctcggccacattggtcaccgtggatcgccgccgtttgttgttggtttccgtagaagagctggacgttgaacggctcgtaatgcttttgcctagtttttgagtgtgatcaaaaacaagcacaaaacccgccaattctttttgggcctttaccgtgtcccacatagcggggctgttgggccattcaggcttgcgaatcttagtgtaaaagctgttaaacaatatgtacatgttgtgattgtttacccgtttgggccttttggtggctttccgttcatcgccagaacacggcagcgcaacaacagtgtagtttacactttttttttcaaaaaaattaatacaggtttttaaatagtcaaaattgctcttgttataaacgctgttttccaatctgttgattagcgaggcgttgttgctggcaaacgaatcgtcgtgcactacttcgggcaagttgaccattttggcgagcaatacacgtccgttactgagcaggcgtattcgttaactaaatctttttgaagctccagtgtccttgcgattcgtttgtggtggtggcacaccttacgcttcgagcatttgccggtgattactgtaaaacggcttaaatttgctcttatataatcttttacgttgccagcgtcattttccaacaaatgcgcggtcacgttcgtaacttgcaaggtgcgtttcagagtgtttacagcctcgccccacaacgcgtacaactcgctgcgcgtgaggcattcagcgcggtaatcgtaaacacgtcgagtcgtcatcacgcgactctacgcgttgcagcgaagcgtgaaaaaagtcgtgtagccgcttttcgtcaaacagttgtttgacttgccgcacaaaatcaaaaaactcgccgtaattgttggacgcgtacgtgtttaattgtttgttgttcatgtattcaaaatactggtccaagggcacaatggtcagactacgcgcaatttcgcaattaaaacggcgcggccgcagcacgatacggtaatcgttgcccaacgcgcccggcaacaatttcacgctgtatgtattgggtttaaactttacgttggccagagccccgcgcaccacgcccacgtaaattgaatatttgtaagtcacgcctctgtctgtccaatgcaacgtgaacggaaacttgtaaatgtaagcgctgtgaaaaaattttccagtttcttctacaaattcgcgaacggccgtttcgtaaacctttgcgtccgtgcagtcgcggtgcccgcgcggaatggaaattttttccaaaaacgtgtcgttagcggtatcgccgccgtggtaagcgcgccgcgcacacaacaacacggccttgtcaggttccatgatcataaacaagcctgcagaattacgcattttgattaaccgttcttaaacgacgcgcacgtgcaaacccggttgcggttcccacacacactaccaggaaataaaaaaaacaatggtacatgcaaacatttttatttttaaaattatacaaatttgttgttggtagtgttaacgctcttgatttccattggaaacaaaaacgctttttcgtatttaggcaaactgttgttttgaggcacgttgatgtgcacgtcggcacgtgctctatttgaaattgccaccatgggctggcggtcgtcgttggtaaaggaaacaacaaccgagccgcgtcgtcgcacgcaatgtcgttttaaaaggcaataagcgccaataacgcagaacgcgctaaaaacacccactgataccagcacggatattaacacaacagcgtttgcgttgttttgcgccggtttagtatccggcacgttaatgcgctgagaaaaataaacttcgggtggctgcgtataatcttgaatgtgaaatctggaacgcaacgttttcaactgctgcacgctcaagtttgtgacagaatcggcaaattgtgaagacgtctggctcaatagcgatgcgttcacataattgttgaaagtgaaacggcgctggggccaatacaaagttgaaacagttgcataagaccgtgtgtcaacgttgaacgtgagcgcgttcttattaacggtcaccgaacacgttacagatggcaatgcagttaatacgcctactcccgccggcacgataatggtagcgtaagtgtaatcgtgttcgttgcaccagtagtttaccgtggcgctgcttgaaaactggtaaagccattttcgtttgtccacgatcgtgtttaaaagtacttgtttggcatcgttgcttgcgacgcgcacgtcacacaacacgtctatatcttttacataacgacccataaacatttcaatctcgcaaacgcccgagtccacggtggcaacacgcgggctggccgggcataaaaattcgtcgtagcctgtaaattgctggcatttaagttgaaagtcatccgatacttgcgtgtaaaaatttcgcgtgtcagtgactgcaacatatttggtggccggtaccatcattagacacaaggtgccgcgacaaaacggcaccgttgccactctgtacaagttgtactgcagcgccgccgtgtctaaaagcggcattgcaacacacaatattaccgtgtttttgttggcgtacaaatgtaatttgtacgcttgcgacaaatcaaactgcgcgtttgcgttgcgttcaaaatttacaacccagctaagattttgtttctcaagcgtcctgattagttggtgcatctcttgcagcagcacgtcgtcattaagtacgaagttaatgttgtttagtttgttgcgatacgtttgtttaataagtctgtttaaggtgttggcaaaactggcggcgtccgttaactttaaatccatggcggtatgcatgtcggctaaatacaaacatttgtttttaacactacgattatcatccatacacgcttcgtattctaaatatttagttgtcacgttactagtggacatggccggcagtaacttgacacggtcgctcgcatccgccgtcaatagctccctcacgtcgccggcgctaagcaaactccaacgtggcggtttgtttttcgtgttaacgtcaatgatgttttgcggcgcccgcgtgtcttcatagtcgacaaagtcaaggggctctgcatacacatcgttgttatttgagtttgctgcgtaacttacaaaattgctgtttatttgcgttaaagacgctaactgcttggctatgcggctcaaagtccccattggccggcttggtttgattttttttaatatcgagcaatcgcccggttcgttgtctcgtacaaattcgtaaattttcgtaagttcctccaaaagcggttgataatcgatggttcgaacaaacacgaaccgctggtcggtcacgtggcgcattgcgccgatgcgttcaaacaaaagacctgaggcgtcgtcgacgggctcaaaattaatcgaagcagccgcagtcgtgcagcctaacaaggcaataaaacatatgagagtacaccccatattgtttcttccgatttcggaacactactgattttgcaagccaacgcgctcgttttatatactagtctatgactcacgctaacataatcacccaagcttataatgcgcgatagagataagataatacaatatttttgtgcgcaatagataattatgcgcaaaaagataaacagattagattactcaggtcaataacccgcgctcatcgttgtatcgcacacgtgatcgcgtgtccagaaaaaaacgatgggtgggttcgttcagcccgtttccggacaacgggtacgagcctggaacctcaaacgcaaacgctgcgtccgtgttgctatcaaacacatcgctgggacatagtaatttattactggaaaacctgtcgatcgacgtatacgtatttacacattccacgcgaaacctgtgggacgccgtggcggtgtccaggccgtctacaatgctagcgcacatggacgtgcggtcgccgggaacgatgtggcgcacgcgcgtgaccgcttcgatgccgcaatcacactctcccgattcaaatatcgggcgcacggtggaatgtacatggttaacgtttgtacaaacatttggcaagcattccagggggtttaacgggttcacaaacattagattgttgttgttatcgcgcgcgttgcagcgcatttcaaaccgtcgcgacccgtcttccagcaactcatcccagctgcgtcgaaacgtgttgctggcaacgttcacttcgcgtcccaataaccggtcaaacaggatgttgcggtcgctttggccgggtaaaatacggtcaaaatgttgacgcccggctaattgagtcatgttgcttgtgccggcgaagtagcgcgggtcttcggcaatgcacgtccactggttaaagctcatcagcacaacgctggtttcgcgattgcagtcgcgcggcacgctgttagtggtacagtaaccgcccacagctagtttatggccgttgaccacaaacatgtctctctctcccacaaaaaaataggctgccctcgggtcgtcgcacacttcggtgcaatcaaacatgggcagatttagttcgctaacaaacaagggtacagacatgcactttagactttcccccgccagggtgccaaggttggtgtcgaaacgcaccgagggtagtgtttccatgggaacgtaatgtctacgccgcataaccgactcaatgtactccatcctatcggtcaaagtctcgttgtaatcgcgctgggcgtggtctatatgattaaaagcctgataaaaaggccacattactatataaagcagcgcaaacaagaaaagcacaattagtattcgatacatgctgctaccacttagtacttcagcatgttagaaaaaattaattatattctgcagctactgttgcactttgaactgtacgcggtaagcctagttgcgtttgtgttttcgttgatgggcaccgtgaacgaaaaatacgcttttcttttggaattagaaaactcgacgcgctcggtcataaatgtgtcgtttttggcggtgtttttattgggaccatgcgtgtttgttaccactacatggggcgtgcataaattaattttgtgctaccacaaacaaactaaagtgtgtgacaattattacataaaaacaataataacagtggtgcatttgttggcgattagttattggacgttgtttgtggtgtaccaacctcaaatatacaataacgggcacataccattattagatgcatttgcaagagattatgatcggcaatcgttgtgttggaacaatgttgtgttaaaaaaatacgaagtgcacgattttaacgcaatattagtgcacaatttaaaccctatttttgtgagtaccaattgtgtgtacctagacaattatattaagaaatgcgttggttgcaggctggaacttaggcacaatgaaccaacgatttttaatcaaaaccaagttgcgctcatgatgatagcgattttgttgattgttttgcattgctggaacatgtacattttaagaaaggaaatgcgtaaaaggccagtaatccaatcgggagaatcggcggaattaaaatacgacgacactgataaagaggaggaggagcaatttcaaagcaacaaaagaatgcttgaaattataagcgaagaccgacgccaaattgattttgaattcatgcctctaactacgtttagttatgttgatgaagtggaatgtccgttggtgcgattatctgaacccaaacaagttactataaatttgccgccaagttcgccggacagcggcattagcgagccgcattacgctgttcccaaaccaattaaatcaatctacagtgtgcctgatcgaagaaaaatcaaacccgttccaccaccccgaaatcctgttccacaacaccgaaaaaaaaattcgctggcaacgaagcctatatacgttaatatagatactgttttttaaaatgtatcacgtttgtattgtatcagtattgtgtcagtattttttgtattcattaaaaaccaaaaatttttacaataaatattttattatttaataattttttttaataatatttttctaaaagaatacctaacactttattaagcaactgatgttgtacggttaatccgtcgccattggcaatacaaaaattaaccagcccgttgagcaccatgcttttctgatacacgtttcgctcaaccgttactatccaatcaaacaaataaagcaacgccggcaaacttatcttgtttccggtcatggccgatattgcgaacgcgatggcttggttgcaataaaagccatgacctgcactggtaaacatagacacggcctgttgtgcgcgcgcatttgtccaattcagacgtgcggattgcattactatggagtgcgttgcaaatcaaatttatcggggggcgctgccttacattaccattaaagacatagaagatcgcttgcgcaaccaaattgctgccaaagcaggtgcggatttttttaaaaattgttttgagtcggtggtggccgacaaaagcgggctgtttgtgttaagtggcggcgcggccgccgcttgccacgtagacaatgctcgcggggtatgcgcgctaaaatgcctcgactttgattactataattctacccgacaatggctgcatctggctcgtttgcaacgccagctgcaaacgtgcgtgcaagacgcctttgaaaatttggcgcaaataaccgaaaatgtacgcatgcaagatcatttaaccgtgttgaaatgttttcaaaatggcgcgtttcgtttttgtggacccgtgaaactgcgcctgctgccgcacgtggaaacggtgcgcaccgactttagcggcgagtttgacctggtgcggtttgcgctacaagtggaaatgtggtctcccgacggcgtcgatgaatacaacgatcaaaagttgatactaaatcgcggcaccgtactttttaatgtgtattttgtaaacatacgagtaatgaaaattccgctgttcacggaacgtagcgtcaaaacattttttatttttggaaacaattatcatgtgcttgtttcaccattacaacgcgtgttaaacgatcaaattatgtgtttgctaaaagacattttcaccgacaagcccgattttaaagtggcgcgacgcaaaacgcgtctttgcgcattattttcccaactgccgcaaacagcgtttgatgaatgcattaacaaccacaacgacgtcgaacctacccgtcggcgcgatgaaagcatcactagtttttgcaaaaaaacattagatatttacgggccggcgttgggatgttgcaagcttgtatacgcctatttcaagaccaacacgtttacaaaccaagtgcccgattacacggcccattatgtcaattatccgcacaagaattgtgaaatgaaatggaaagagtttatacattttctagttgtaattaaagtttaataaaacaataaatgattaacaattagttttattaacacattaaataaatttaaaaataaatactaaagtaaacaactgtctacccgtcacataattaattgcaggaacccagttagaggcattgacgcttttagcgttaataatatcaagtttagttacactagtaaatttggctacattacttgctaaatcaacatcttcttgattatccctaataaacaaccctcgcaacgcgccccaggcggtttttatataagcctcgttaacaaacatttttagcattgtttcttgccgctcgatggcgtttaccgcaaggcgcacttgacgccgcccagcgtgacgcaccgcaaacagcggtccgacaagaaacggcacagtaacgccttcgtcgtccggtttggcaaagccgtcaaacacaatttcacgttgatcgggcgtgttgacaacgcacacagcatcgtaacggctgcacacggtagcttgcaaatgtttctcggcaaaattagtaattgaaattaatactttaaatttggcaaacggcgatcggcatttcactgttaggcaaaactcggcatcggcacacaccggagtcagcgaaaaacgctcgctacgttttggctcctcgacaccctttaaattaataggcaccagcgtcactgtgatatccattgtgcaaaacttgctgaactataagcttggcgcttactactttgtccgcatctgtaacttcaaaccgcttattggttccgtgcactaccacgccagcccccaacgaagtcgttaacgcttctgcgatgcgtcgccgatcgcgtgcgcaatcggcgcgtcgcgctaaaaacacctgctcaccgcccatttttttcaatccgctgtcgcacaaattgttcagagccacttgttgtgtaaactacgtttttgaaaatgcctacagcaaaatgttttgttttgacgtcatggcgcacatttaaacgtgccattaaagtggcaatgacgttgttcttttttctaatcagccgttgcatgttgcgcacgcgctttctctgcaattgagacaattttgaaaaatttaatcgcgtcttttgcaattgcgcaatgatttgcgctattcttgtgttgctatcgtcggtcttttccgaaagagtagttgtggtaactacagttttgacgtaagcgcgcaccgcgcccgggcggggttgtggggccagcattggaacattagtcgtttccatgtgtatcgacgggcgacgtgttgcgcctgtgagaagcttagccacaataatgacctgctttggaggtgagcgtttataaaggctggaagtgcgcagtcgcacggcgataaataattagtgtgtccaattacagtttattgacaatgattcacaacaaaataatctaacataaatgatcaattatgattcattacattacaatggaaatcgcaaaaaataatctgaatatgccatgttggcggctgttgttttcaacaaacgcgcaggtcgattgacgtcatagctaaaattaattacacgttccgtgtacttaaccgctttttttgccggcgcatcgttgtcgtgttccaaaacagcacgtaggtcgtcgatacgctcgcgatacgtttcctggtcagcgatcactgcgttgatcgccagtgcaagttgggccgccgagacggtggccgtgtttagagaaagcgccacgccaaattgctgcagtttacgcgcgtggtaaaattggtcacccatcataggcaaacacaccatgggcacgcgcgctgcaagcgcttcgtcgctggattgtatgccggcttgcgtaacaaacgccacaacgtttttatgatgcagcaccgagcgttgattaaaccatttttgtatcacgacgttgcgtggcaacgttattgaagcaaccgccgcgtcgtccactttccacaacacggtacgattatttaattgcacaaaagtatccagtaacatttgcagaaattcagcatgaattaaattagtgttaatactggaaccaaagctgacataaatagccccatcaacagatttgttaaggcgtcgttctagcgcaatttctaatctttgcaattgcgccgttttcgttaaatgcaatcctccgcccaaatactgtacgctgggcggtacaggccggttgttgtcgtacaccggatgcagattgagcagcaacaactgcacgttgttgcgcaattggcgaatagaaggagtgtcgcgcccaaactgctgtttcaataactcgtcggctcggcgcgccaacaactcaaactcgttaaataagcgccattcgctaagcgcgcttgccgcttccttaccgtcgttgaaattgctgcgccaaatgttggggaagtggacagggtggcgcgccacggcaccggcggtgtcaaaattttccgccaaaccgtaaccgggcgcaatttgaatcacaggcgctggactgaatatgtgcccgaacaccagcgcatagtccgcaaacgcttctaccgccacggcgtcgaaggtgcgattctcggcaagaaaacggcgcacgttggcattgtcaaactgatctttaaacatatttattagtcccatgtaattgtctgcggtaactgtggtttcgtccgcaaccacgccgcgcttgcgaaaaatgtttgagctagttatcaattttttgtattgctgcgaagacatatcggcatcaatttgttccacgctgccgcattcatcttgcagtgtgtagtttagcaattggggcttgatgacggtcacgttgtgacattgttttattaacgcgtgcacgtatgctctgtacacaacgtggtggctataagccggtgtgggtagcaccgccaaaatattagcggcccgcgcgcccaccgtgagccacgttaaaataataactataaaacccattgtaattgttgaattctcaaaacggtgtgtgacaactctgttgtgttgaccttgtttttataaccgctatccatgacgacgacgacgacgacgccatgcaaatacaccccggagcgcgtcaacatgatgtgggacgccattgcgtacaacgacagtcgcaggttggcgtttatgaccacccgacaacggtgggtgcacgctgtcgacccgtttaacaacgcagcgcagttgtttagttacattgtcaaaaactcggtgagcgacgtgcacgtaaaaccgctggaagaaggcgggcgcgaatgggtcattgacgctgattttaaagattgcgtggacagggccgaactcatgctaaaagttaacgtgggcgcgaccgcgtttatgctgttttttgcagacaaagaagacgccgtgcagcgcgtcgtgtttagcggcaaccgcgggtttcacatgtggctcaagttttgcggcaaatttaaaatggacgcgccaaagaacttgcgcgagcattggtttaacgtttttaaaaaaccttgcaaacttgacaagagcgatgtacgaccgggcagttttgccgcctgtgtgcgtcaagccgtggccatgtacacggacgctagcggcggcgacgatttaacgttacgttattggcccgacgttgatcgagacgtgttttgcaatgccaataaacaaatccgcgcaccgttcagttataattataagggtggcgagtactcgcgctgtataacccagcaattgctaaagcacatcaaaaaaaatgtttaattggatacttagttggtgggacaatgtgagcggcgaacaacaacaacaacaacaacaacacccacccgccaagtttgacgaccaagcctacaaacaatacgctgtcaacaagcgtgcgcactcggatcttgtgcgttgggacgtgtttcgctgttacccgtttgcgtttaaatttcggtacgtgacagacaatagcagcaacgaccgttgttgtagcgttgtcgatttttgcaaaggtttggaaataaaccacgatttgctgttaaaatgtaattttgatcaccaacacgtacttcatctcgacgagttaatgtttaacgctccacgagttaaagccgttgccgccgatattgtaggcagcctttttgccaccaagcaaggattactgcaattgttgcagcaattgccgttcgttaacaaagatgatgtgttgctagccattagaacggacaaaggttacgatcgcgatgatgtgcgcgataaaattgaagcggtgttgaaacatattaaaacgctcaccgccaacagtgacaagtttatcagcgcgcacaaatcgttcaaactcgaggtcggcgcccgctttgaacagtttgaacaacgcttggaatcgatcaacacaaaagtcaacgcgttgcaagcgcccacgcaaacgacggaagcgccggttagcgtggtgtttccgcgcgacgtaacaaaacatcctcacttggccgtgtttatgggccgcgcggaagagactggtaacacgcaaattgcgtttgcgcgcggtcaagaaaaccattttcgtcggcgcaaactagagtttgaagacaacatggacgtcatgtttgagggcgtgcaccccaacccgctgttggccatgcaatgcattaaagaggaattctacaacagcggccacaaaattcgccggctgtctaaaaaagtaatagaagtcaaatgtgctgtcaatgtggcaaaggacattgttaaaaaggctattattaataaagataaataattttaaacactttattatttataattagatttattaacaacatttttataaaatttattaacaatataatcataacagtcggtgtcgatgtcctcagcgtttacgcaacacaacaaatcaaacaacatgttttttttccggtcagacgtggcgtttatgtacaacgtgtcggcgtgtttcttgaggtcggcgtacgtgtttttgcaatgccgaccaaaatcttttatgtaacaagggtaatctttgttgtttgccggctcgcctcgcaaatattggaacagcaagtgagtgttggtcattttgtggtgctcaaaatggtagcggcctatgccgcaaaaacggccgtacacgctagcaatggccggcgcgcaattgccctcgtcgttcggccgaatatatttcgttacagaattctgcaaccgcatggttaactccacgggcactgacccggcaatcattcggtgcatgtatgttaacacacaaaatttgtggtaccaccacccatcggccttaattgtggggtcaaacacttccgcaacatgttcgagcgcactgcatcgcgcaaaatgtataaaccggccgatgatgccttgtaaactatctaccacgtcgttcgaaatgtcggcaacaaacgcgtccaacgcgtaaatgtcgccgccttttgcgacacgtttgtcaagcggtacaaaacggtctatggtggttagggcacgttgcaaatcggtgcacaatccgctcgtgtcgccgcaacggtaccacgccgacaggcacgtggcaacttcgcctatttccagcacctggcgcgcatcatcgaaagaaataccgccgtagtttaggcaacgcgccgtcgcaatgtctcgacgcacgcacgaagcttcgcacacatacgcattggtcacgtattcttcgacaagcctgtgcaagtggtacgattcgccgtaattcttgtgtgccgcattgtaaacaccataaaaggcgtacacgagaagttttgaagacagggacatgttgttgctggcacagctgaactcactctgcttacagcattcaaaccattgcgtttatatacacgttggcgcggcgcgcgttttagtttaattaatgtataaacaaaaaaaagatacaaatagccgtgcattaacgttgtcgggtttattggccgctcgcttatcggtaagagcgaacgcgcgatgtttcccgaccgctggcacgactacaccgcgtgcggtggcgtcatcgaaggcaccaaaatactatgtttcaaaacaccgttgaacgcggagctgttcgagtacgtgaccaacgacgaggaccgatggaccgtggctaaattgctggctaacggcgcgctgggcgccgtgatagatttgaccaacaccacacgctattacgacggcgcagaaataatgagagcgggcgtgctgcacagaaaaattcgcgtgccgggccgcgcaattcctgacgaaagcgccgttaaaaaattttgcgacaccgttgatgagtttagaaaaaaatgccctactatgttgattggcgtgcactgcacgcacggagtgaaccgcagcggatatctggtgtgtcgttacatgattgacaaattgggcgttgcgccgtccgatgcaattgcccgatttgaaacggcgcgcgggcacaaaattgaacgcgacaattattcacagaccttgcttgcgcgaactaattcaaataaattcattgaggcaaacaataattgaatacgggagaacatgcgccgctacagcattcgtcgtcgtgaacgcaaacggcgccggtctcggcgcaagcggtcaaaacatgctgagcgttcaacgcaacaaacagcacaacggccaacaacatagatttaatttgcatagtgaatgaaataaaaatggttaaagttgacgattttttaatttatcttattttaacaataaataaaattagctgttcaacaattgttttaatcgcgcctcaaattgctgcgcgtcttcctccgattcaaaactaatggcacgtttggtttttttggcgggcaattgatgtgtggcgttgttccagtccacggtggggttgggccgcgtggcttccgccacgacgctggccgcgtcgatgtggcgcttgtgcttttggctctgcacgtacgccttctgacccgcaatggccgtgaacgtggtgccgtcgcgcgccacgcacagcaccgggtgcttgcgttcgtccgccgggtactgcaccgcgcgccccgacaagtccaccatcttggcaaccaactcggtgacctgcgcgtctttaacctgcaacagctcgtcctttttttgcatcatttcatcttttctttgcatggtttcttggaatccggtgtacatgcggttaaggtcggtcattacacgggtcacttgcaaatctttgacctcaatctgcttgtccttaattgcgatgatgcgttcaatgaactcttgttttttcacaagttcctcggttttttgcgccaccaccgcttgcaaagctttagcgttatcggtaaatgtagctatcaacttggtcaccagctgtttgttttcttcttcccgttgtttgatcgcggggtcgtacttgcccgtgcacagcacctgcgggatgacctcttccagcagccattcttgtaactctacggcgtaaggcagtttggacttcatgatcagctgaatcacgccggatttggtaataagtactgtgtgcggctgcaaataaagcgggtcaccccttttcgcaacgctgttaaaggcagggagagtaaattgctctccctgctcaaatgtcgttttgtatttaacgtccacgtgtttgcgcacagattctgtagtattttcatattttaaagctgtggcaacgtccttggctacgaacttaacttgttgttgattgcgctcgagcacgtaccgcagcgtgaacgtgtcctcaccaaatttaaattgaccgatttttacttgcgacattgtgacacgtgcgtattgtttaacaattgtgcaacaactaacagcgcgctatgttataaatcacctccggcgttgatgcgctgcacttcaaatagttcgttaacgccctcctccgtttcgtcgccgaacacgcccagcgggtggtcgatgaccagcaccgcgccgcactcggcgcacaggtagcgtgcgatggagtggtcgtcgggcgcgggcacgtcggccatcgcgtggcagttttggcacacgcggtaataaatgacgtcgggctgcacgcgcatatcaatcgtgccgtcaggcatgtacgcttggacgttgaccgccatgcacgctgcgacgagcgcgttgcggtcaagaaacccaaaacggtgcacgtgcacggacgtgactttgccgtcgatgagtgcgcgcagccgcgctagatggtcaatgtgcgcgacaatgttttctttatactcttgcgtcaaccgcaagctaaacctgatgaagcgcgcgccgaacatattgtttaaatgcaacaataagttactttcgtttaatgcaactttacacaataatatataatgaaccggcccacagcagcagcagcaaggaacgcggcggccgtggtgacggtcgactacgatcaaaatcaactcaggcgcgatttaaatagcttgcgccgtaacgtgcacgagctgtgcacgcggtctgcgacgaccggctttgattgtaaccggtttttagatagcactgacaggcggtttatagacagcagtgacagggcggcggcggtggtggtcaaaacggctggccagaacaatcagaatttaatttgcgataaagtgtgacatggaacgctcggccgccgtgtggaaccctgccgcgggcgccgccagcctcaaaagggccgacacataccttatcgaccctaacgattttgtcggcgtgctaacgctttcgccctacaccgtgtttgagcgcgggctgtttgtgcgcatgtcggggatgcggttgctggcgctgctgtccgccgcgcctaaaccaacaaattcaacaacgccagcggcacgccgttttccgcagcgcagcaagcgcaacatttgtttaaaagcgtgcgccgacgggtcagtaagtttggtaaaagcgttgacgacgcgccttcacttgccgttgtgcatgagcaatataatggcaagtcttagcgaggcgccgcgaggcaacatgtacagaaaacgctttgagtttaattgctatttggccaacgtgcttacgtgcactaaatgcaagacggcgtgtttggttggcgcattgttgcacttttacaaaatggatccaaaatgtgtgggcgaagtgatgcatttgttggtcaaagccgaggacatgtacaagccgtccaattgcgccaaaatgaaaaccaacacaaagctgtgccccgtggcggggttatgcaagggcaaaaaccccatttgcaacaattagtaagtttacaacgctcgcacaacatggccgtttcttcttcttcgtgtgccagcgagcacaaaattttgcaaatgttttaccgctggagcagcaaatttggtgcaaatttggaaagcgacgctgatttggaatgtttgtacgatttagagcggtttgtgggcgcgcacctaaacgggcggatcgacgctaaaacaaaaaagcttgcggagcgcgctgaaaaggcggcggttaagcgtgttgagttggctgccgatcggctggcgcaggagacggcggccgatgtcgtcgtgagcgacgacgggcggtggccgctgcttactcgacagcagcgcgacgacattgcgcgcgaaaaggaaattgtcgaccgcatctacatgttgcaactgaagcaggaacggatgttaaagccaaaaaaagggttgaataaaatgcgtttttaaacatgtttttttattttttgaataattataagtaatttgctgttattgtagcaattttgtaataaaatatcctataact

SEQ ID NO: 13 - protein, 168 aa, Autographa californica multicapsid nucleopolyhedrovirus
MFPARWHNYLQCGQVIKDSNLICFKTPLRPELFAYVTSEEDVWTAEQIVKQNPSIGAIIDLTNTSKYYDGVHFLRAGLLYKKIQVPGQTLPPESIVQEFIDTVKEFTEKCPGMLVGVHCTHGINRTGYMVCRYLMHTLGIAPQEAIDRFEKARGHKIERQNYVQDLLI

SEQ ID NO: 14 - protein, 168 aa, Rachiplusia ou multiple nucleopolyhedrovirus
MFPSRWHNYLQCGQVIKDSNLICFKTPLRPELFAYVTSEEDVWTAEQIVKQNPNIGAIIDLTNTSKYYDGVHFLRAGLLYKKIQVPGQTLPPESIVQEFIDTVKEFTEKCPGMLVGVHCTHGINRTGYMVCRYLMHTLGIAPQEAIDRFEKARGHKIERQNYVQDLLI

SEQ ID NO: 15 - protein, 168 aa, Bombyx mori nucleopolyhedrovirus
MFPARWHNYLQCGQVIKDSNLICFKTPLQPELFAYVTSEEDVWTAEQIVKQNPSIGAIIDLTNTSKYYDGVHFLRAGLLYKKIQVPGQTLPPESIVQEFIDTVEEFTEKCPGMLVGVHCTHGINRTGYMVCRYLTHTLGIAPQEAINRFEKARGHKIERQNYVQDLLI

SEQ ID NO: 16 - protein, 179 aa, Maruca vitrata multiple nucleopolyhedrovirus
MFPERWYNYLQCGQVIKGSNLICFKTPLRPELFAYVTSEEDVWTTKEIVKQNPSLGAIIDLTNTFKHYDGVHFLREGLLYKKIKVPGRTLPLQNMIQEFIDTVKEFTEKCPGMLVGVHCTHGINRTGYLVCKYLIHTLGIAPQEAINRFEKARGHKIENAGYLQDLRAAKPADAATIVD

SEQ ID NO: 17 - protein, 173 aa, Choristoneura fumiferana defective nucleopolyhedrovirus
MFPGRWHNYTTCGKVIEGTNLICFKVPLKQEVFEYVTNDEDRWTVSNLVNRQRALGAVIDLTNTLRYYDGAKVRDAGVLYKKIRVPGQEVPNEDIVQEFFDSVQEFSARCPGMLIGVHCTHGLNRTGYLVCRYIIDKLHVSPTDAIARFEAARGHKIERRNYLEDLLKRHVRR

SEQ ID NO: 18 - protein, 174 aa, Anticarsia gemmatalis multiple nucleopolyhedrovirus
MFPRRWHNYTTCGKVIEGTNLICFKVPLEQEVFEYVTNDEDRWTVYNLVNKQRALGAVIDLTNTLRYYNGAEVRDAGVLYKKIRVPGQEVPNEDIVQEFFDTVQEFSAQCPGMLIGVHCTHGLNRTGYLVCRYIIDKLHVSPADAIARFEAARGHKIERRNYLEDLLKRHHVRR

SEQ ID NO: 19 - protein, 169 aa, Epiphyas postvittana nucleopolyhedrovirus
MFPDRWHDYTVCGNVIEGTNFICFKVPLREEMFEYVTNDLDRWTIKNLIKQQCSLGAVIDLTNTFRYYDNANMRDEGLLYKKIRVPGQVLPDENVVQLFFDVVKHFTARCPGMLIGVHCTHGLNRTGYLVCRYMINILNISPQDAIARFETARGHKIERQNYIQHLLTL

SEQ ID NO: 20 - protein, 178 aa, Antheraea pernyi nucleopolyhedrovirus
MFPDRWHEYTACGSVIAGTDLISFKVPLREEAFEYVTNAEDRWTVASLLALPTLGAVIDLTNTTRYYDGAELRRAGVLYRKLRVPGRALPDESVVREFCAAVEELRALCPGMLVGVHCTHGVNRSGYLVCRYLVDRLGVPPADAVAQFAAARGHAIERTNYVDDLLARVGGPIPASSS

SEQ ID NO: 21 - protein, 177 aa, Choristoneura Fumiferana Multinucleocapsid nucleopolyhedrovirus
MFPDRWHEFTPCGRVIDGTRLICFKVPLSAELFEYVTNDEDRWTVASLLTRHSALGAVIDLTNTTRYYDGEQMIREGLLYKKIRVPGRAIPDEDTVQKFFSAVDEFQDRCPTMLVGVHCTHGLNRSGYLVCRYMVDKLGVSPADAIIRFEEARGHKIERANYLQDLLARNHVRREPN

SEQ ID NO: 22 - protein, 220 aa, Orgyia Pseudotsugata Multicapsid nucleopolyhedrovirus
MLTSRRWAVIYTRTSERNCGGAWCTNGVRRRRQVHLPSVRARAMFPDRWHEYTACGAVIEGTRLLCFKVPLNAELFEYVTSDEDRWTAASVLARHSALGAVIDLTNTARYYDGAQMVKMGLLYKKIRVPGRAVPDDDIVAEFIETVDEFFRRCPTMLVAVHWTHGLNRSGYLVCRYMVERLGVSPTDAIARFETARGHKIERTNYLQDLLARKHVRGQPN

SEQ ID NO: 23 - protein, 180 aa, Hyphantria cunea nucleopolyhedrovirus
MFPDRWHDYTACGGVIEGTKILCFKTPLNAELFEYVTNDEDRWTVAKLLANGALGAVIDLTNTTRYYDGAEIMRAGVLHRKIRVPGRAIPDESAVKKFCDTVDEFRKKCPTMLIGVHCTHGVNRSGYLVCRYMIDKLGVAPSDAIARFETARGHKIERDNYSQTLLARTNSNKFIEANNN
